United States Patent Application Publication US 2026/0297575 A1, published October 1, 2026 (application 19/474,577).

The application's sequence listing, which the Patent Office published only in electronic form, follows.

SEQUENCE LISTING (2032 sequences)

SEQ ID NO: 1 - DNA, 72 bp, synthetic construct
  misc_feature 1..72: note = Description of sequence: transcripted tRNA sequence; tRNA name: Ala_AGC_chr6:28763741-28763812 (-)
  source 1..72: mol_type = other DNA
gggggtatagctcagtggtagagcgcgtgcttagcatgcacgaggtcctgggttcgatccccagtacctcca

SEQ ID NO: 2 - DNA, 73 bp, synthetic construct
  misc_feature 1..73: note = Description of sequence: transcripted tRNA sequence; tRNA name: Ala_AGC_chr6:28763741-28763812 (-)
  source 1..73: mol_type = other DNA
ggggaattagctcaagtggtagagcgcttgcttagcacgcaagaggtagtgggatcgatgcccacattctcca

SEQ ID NO: 3 - DNA, 73 bp, synthetic construct
  misc_feature 1..73: note = Description of sequence: transcripted tRNA sequence; tRNA name: Ala_AGC_chr6:28763741-28763812 (-)
  source 1..73: mol_type = other DNA
ggggaattagctcaaatggtagagcgctcgcttagcatgcgagaggtagcgggatcgatgcccgcattctcca

SEQ ID NO: 4 - DNA, 73 bp, synthetic construct
  misc_feature 1..73: note = Description of sequence: transcripted tRNA sequence; tRNA name: Ala_AGC_chr6:28763741-28763812 (-)
  source 1..73: mol_type = other DNA
ggggaattagctcaagtggtagagcgcttgcttagcatgcaagaggtagtgggatcgatgcccacattctcca

SEQ ID NO: 5 - DNA, 73 bp, synthetic construct
  misc_feature 1..73: note = Description of sequence: transcripted tRNA sequence; tRNA name: Ala_AGC_chr6:28763741-28763812 (-)
  source 1..73: mol_type = other DNA
ggggaattagctcaagcggtagagcgcttgcttagcatgcaagaggtagtgggatcgatgcccacattctcca

SEQ ID NO: 6 - DNA, 73 bp, synthetic construct
  misc_feature 1..73: note = Description of sequence: transcripted tRNA sequence; tRNA name: Ala_AGC_chr6:28763741-28763812 (-)
  source 1..73: mol_type = other DNA
ggggaattagctcaagtggtagagcgcttgcttagcatgcaagaggtagtgggatcaatgcccacattctcca

SEQ ID NO: 7 - DNA, 73 bp, synthetic construct
  misc_feature 1..73: note = Description of sequence: transcripted tRNA sequence; tRNA name: Ala_AGC_chr6:28763741-28763812 (-)
  source 1..73: mol_type = other DNA
ggggaattagctcaagtggtagagcgctcgcttagcatgcgagaggtagtgggatcgatgcccgcattctcca

SEQ ID NO: 8 - DNA, 73 bp, synthetic construct
  misc_feature 1..73: note = Description of sequence: transcripted tRNA sequence; tRNA name: Ala_AGC_chr6:28763741-28763812 (-)
  source 1..73: mol_type = other DNA
ggggaattagcccaagtggtagagcgcttgcttagcatgcaagaggtagtgggatcgatgcccacattctcca

SEQ ID NO: 9 - DNA, 72 bp, synthetic construct
  misc_feature 1..72: note = Description of sequence: transcripted tRNA sequence; tRNA name: Ala_AGC_chr6:28763741-28763812 (-)
  source 1..72: mol_type = other DNA
gggggtgtagctcagtggtagagcgcgtgcttagcatgcacgaggccccgggttcaatccccggcacctcca

SEQ ID NO: 10 - DNA, 72 bp, synthetic construct
  misc_feature 1..72: note = Description of sequence: transcripted tRNA sequence; tRNA name: Ala_AGC_chr6:28763741-28763812 (-)
  source 1..72: mol_type = other DNA
gggggtgtagctcagtggtagagcgcgtgcttagcatgtacgaggtcccgggttcaatccccggcacctcca

SEQ ID NO: 11 - DNA, 72 bp, synthetic construct
  misc_feature 1..72: note = Description of sequence: transcripted tRNA sequence; tRNA name: Ala_AGC_chr6:28763741-28763812 (-)
  source 1..72: mol_type = other DNA
ggggatgtagctcagtggtagagcgcatgcttagcatgcatgaggtcccgggttcgatccccagcatctcca

SEQ ID NO: 12 - DNA, 72 bp, synthetic construct
  misc_feature 1..72: note = Description of sequence: transcripted tRNA sequence; tRNA name: Ala_AGC_chr6:28763741-28763812 (-)
  source 1..72: mol_type = other DNA
gggggtgtagctcagtggtagagcgcgtgcttagcatgcacgaggccctgggttcaatccccagcacctcca

SEQ ID NO: 13 - DNA, 72 bp, synthetic construct
  misc_feature 1..72: note = Description of sequence: transcripted tRNA sequence; tRNA name: Ala_AGC_chr6:28763741-28763812 (-)
  source 1..72: mol_type = other DNA
gggggtatagctcagcggtagagcgcgtgcttagcatgcacgaggtcctgggttcaatccccaatacctcca

SEQ ID NO: 14 - DNA, 72 bp, synthetic construct
  misc_feature 1..72: note = Description of sequence: transcripted tRNA sequence; tRNA name: Ala_AGC_chr6:28763741-28763812 (-)
  source 1..72: mol_type = other DNA
gggggtgtagctcagtggtagagcgcgtgcttagcatgcacgaggccccgggttcaatccctggcacctcca

SEQ ID NO: 15 - DNA, 73 bp, synthetic construct
  misc_feature 1..73: note = Description of sequence: transcripted tRNA sequence; tRNA name: Ala_AGC_chr6:28763741-28763812 (-)
  source 1..73: mol_type = other DNA
gggggattagctcaaatggtagagcgctcgcttagcatgcgagaggtagcgggatcgatgcccgcatcctcca

SEQ ID NO: 16 - DNA, 73 bp, synthetic construct
  misc_feature 1..73: note = Description of sequence: transcripted tRNA sequence; tRNA name: Ala_AGC_chr6:28763741-28763812 (-)
  source 1..73: mol_type = other DNA
ggggaattagctcaggcggtagagcgctcgcttagcatgcgagaggtagcgggatcgacgcccgcattctcca

SEQ ID NO: 17 - DNA, 72 bp, synthetic construct
  misc_feature 1..72: note = Description of sequence: transcripted tRNA sequence; tRNA name: Ala_AGC_chr6:28763741-28763812 (-)
  source 1..72: mol_type = other DNA
ggggatgtagctcagtggtagagcgcatgcttcgcatgtatgaggtcccgggttcgatccccggcatctcca

SEQ ID NO: 18 - DNA, 72 bp, synthetic construct
  misc_feature 1..72: note = Description of sequence: transcripted tRNA sequence; tRNA name: Ala_AGC_chr6:28763741-28763812 (-)
  source 1..72: mol_type = other DNA
ggggatgtagctcagtggtagagcgcatgcttcgcatgtatgaggccccgggttcgatccccggcatctcca

SEQ ID NO: 19 - DNA, 72 bp, synthetic construct
  misc_feature 1..72: note = Description of sequence: transcripted tRNA sequence; tRNA name: Ala_AGC_chr6:28763741-28763812 (-)
  source 1..72: mol_type = other DNA
ggggatgtagctcagtggtagagcgcgcgcttcgcatgtgtgaggtcccgggttcaatccccggcatctcca

SEQ ID NO: 20 - DNA, 72 bp, synthetic construct
  misc_feature 1..72: note = Description of sequence: transcripted tRNA sequence; tRNA name: Ala_AGC_chr6:28763741-28763812 (-)
  source 1..72: mol_type = other DNA
gggggtgtagctcagtggtagagcgcgtgcttcgcatgtacgaggccccgggttcgacccccggctcctcca

SEQ ID NO: 21 - DNA, 72 bp, synthetic construct
  misc_feature 1..72: note = Description of sequence: transcripted tRNA sequence; tRNA name: Ala_AGC_chr6:28763741-28763812 (-)
  source 1..72: mol_type = other DNA
gggggtgtagctcagtggtagagcgcatgctttgcatgtatgaggtcccgggttcgatccccggcacctcca

SEQ ID NO: 22 - DNA, 72 bp, synthetic construct
  misc_feature 1..72: note = Description of sequence: transcripted tRNA sequence; tRNA name: Ala_AGC_chr6:28763741-28763812 (-)
  source 1..72: mol_type = other DNA
ggggatgtagctcagtggtagagcgcatgctttgcatgtatgaggtcccgggttcgatccccggcatctcca

SEQ ID NO: 23 - DNA, 72 bp, synthetic construct
  misc_feature 1..72: note = Description of sequence: transcripted tRNA sequence; tRNA name: Ala_AGC_chr6:28763741-28763812 (-)
  source 1..72: mol_type = other DNA
ggggatgtagctcagtggtagagcgcatgctttgcatgtatgaggccccgggttcgatccccggcatctcca

SEQ ID NO: 24 - DNA, 72 bp, synthetic construct
  misc_feature 1..72: note = Description of sequence: transcripted tRNA sequence; tRNA name: Ala_AGC_chr6:28763741-28763812 (-)
  source 1..72: mol_type = other DNA
ggggatgtagctcagtggtagagcgcatgctttgcacgtatgaggccccgggttcaatccccggcatctcca

SEQ ID NO: 25 - DNA, 72 bp, synthetic construct
  misc_feature 1..72: note = Description of sequence: transcripted tRNA sequence; tRNA name: Ala_AGC_chr6:28763741-28763812 (-)
  source 1..72: mol_type = other DNA
gggggtgtagctcagtggtagagcgcatgctttgcatgtatgaggcctcgggttcgatccccgacacctcca

SEQ ID NO: 26 - DNA, 72 bp, synthetic construct
  misc_feature 1..72: note = Description of sequence: transcripted tRNA sequence; tRNA name: Ala_AGC_chr6:28763741-28763812 (-)
  source 1..72: mol_type = other DNA
gggggtgtagctcagtggtagagcacatgctttgcatgtgtgaggccccgggttcgatccccggcacctcca

SEQ ID NO: 27 - DNA, 71 bp, synthetic construct
  misc_feature 1..71: note = Description of sequence: transcripted tRNA sequence; tRNA name: Ala_AGC_chr6:28763741-28763812 (-)
  source 1..71: mol_type = other DNA
gggggtgtagctcagtggtagagcgcatgctttgcatgtatgaggcctcggttcgatccccgacacctcca

SEQ ID NO: 28 - DNA, 73 bp, synthetic construct
  misc_feature 1..73: note = Description of sequence: transcripted tRNA sequence; tRNA name: Ala_AGC_chr6:28763741-28763812 (-)
  source 1..73: mol_type = other DNA
gggccagtggcgcaatggataacgcgtctgactacggatcagaagattccaggttcgactcctggctggctcg

SEQ ID NO: 29 - DNA, 73 bp, synthetic construct
  misc_feature 1..73: note = Description of sequence: transcripted tRNA sequence; tRNA name: Ala_AGC_chr6:28763741-28763812 (-)
  source 1..73: mol_type = other DNA
gggccagtggcgcaatggataacgcgtctgactacggatcagaagattctaggttcgactcctggctggctcg

SEQ ID NO: 30 - DNA, 73 bp, synthetic construct
  misc_feature 1..73: note = Description of sequence: transcripted tRNA sequence; tRNA name: Ala_AGC_chr6:28763741-28763812 (-)
  source 1..73: mol_type = other DNA
ggccgcgtggcctaatggataaggcgtctgattccggatcagaagattgagggttcgagtcccttcgtggtcg

SEQ ID NO: 31 - DNA, 73 bp, synthetic construct
  misc_feature 1..73: note = Description of sequence: transcripted tRNA sequence; tRNA name: Ala_AGC_chr6:28763741-28763812 (-)
  source 1..73: mol_type = other DNA
gacccagtggcctaatggataaggcatcagcctccggagctggggattgtgggttcgagtcccatctgggtcg

SEQ ID NO: 32 - DNA, 73 bp, synthetic construct
  misc_feature 1..73: note = Description of sequence: transcripted tRNA sequence; tRNA name: Ala_AGC_chr6:28763741-28763812 (-)
  source 1..73: mol_type = other DNA
gccccagtggcctaatggataaggcactggcctcctaagccagggattgtgggttcgagtcccacctggggta

SEQ ID NO: 33 - DNA, 73 bp, synthetic construct
  misc_feature 1..73: note = Description of sequence: transcripted tRNA sequence; tRNA name: Ala_AGC_chr6:28763741-28763812 (-)
  source 1..73: mol_type = other DNA
gccccagtggcctaatggataaggcactggcctcctaagccagggattgtgggttcgagtcccacctggggtg

SEQ ID NO: 34 - DNA, 73 bp, synthetic construct
  misc_feature 1..73: note = Description of sequence: transcripted tRNA sequence; tRNA name: Ala_AGC_chr6:28763741-28763812 (-)
  source 1..73: mol_type = other DNA
gccccggtggcctaatggataaggcattggcctcctaagccagggattgtgggttcgagtcccacccggggta

SEQ ID NO: 35 - DNA, 73 bp, synthetic construct
  misc_feature 1..73: note = Description of sequence: transcripted tRNA sequence; tRNA name: Ala_AGC_chr6:28763741-28763812 (-)
  source 1..73: mol_type = other DNA
gccccagtggcctaatggataaggcattggcctcctaagccagggattgtgggttcgagtcccatctggggtg

SEQ ID NO: 36 - DNA, 73 bp, synthetic construct
  misc_feature 1..73: note = Description of sequence: transcripted tRNA sequence; tRNA name: Ala_AGC_chr6:28763741-28763812 (-)
  source 1..73: mol_type = other DNA
gccccagtggcctgatggataaggtactggcctcctaagccagggattgtgggttcgagttccacctggggta

SEQ ID NO: 37 - DNA, 73 bp, synthetic construct
  misc_feature 1..73: note = Description of sequence: transcripted tRNA sequence; tRNA name: Ala_AGC_chr6:28763741-28763812 (-)
  source 1..73: mol_type = other DNA
ggccgcgtggcctaatggataaggcgtctgacttcggatcagaagattgcaggttcgagtcctgccgcggtcg

SEQ ID NO: 38 - DNA, 73 bp, synthetic construct
  misc_feature 1..73: note = Description of sequence: transcripted tRNA sequence; tRNA name: Ala_AGC_chr6:28763741-28763812 (-)
  source 1..73: mol_type = other DNA
gaccacgtggcctaatggataaggcgtctgacttcggatcagaagattgagggttcgaatccctccgtggtta

SEQ ID NO: 39 - DNA, 73 bp, synthetic construct
  misc_feature 1..73: note = Description of sequence: transcripted tRNA sequence; tRNA name: Ala_AGC_chr6:28763741-28763812 (-)
  source 1..73: mol_type = other DNA
gaccgcgtggcctaatggataaggcgtctgacttcggatcagaagattgagggttcgagtcccttcgtggtcg

SEQ ID NO: 40 - DNA, 73 bp, synthetic construct
  misc_feature 1..73: note = Description of sequence: transcripted tRNA sequence; tRNA name: Ala_AGC_chr6:28763741-28763812 (-)
  source 1..73: mol_type = other DNA
gaccacgtggcctaatggataaggcgtctgacttcggatcagaagattgagggttcgaatcccttcgtggtta

SEQ ID NO: 41 - DNA, 73 bp, synthetic construct
  misc_feature 1..73: note = Description of sequence: transcripted tRNA sequence; tRNA name: Ala_AGC_chr6:28763741-28763812 (-)
  source 1..73: mol_type = other DNA
gaccacgtggcctaatggataaggcgtctgacttcggatcagaagattgagggttcgaatcccttcgtggttg

SEQ ID NO: 42 - DNA, 73 bp, synthetic construct
  misc_feature 1..73: note = Description of sequence: transcripted tRNA sequence; tRNA name: Ala_AGC_chr6:28763741-28763812 (-)
  source 1..73: mol_type = other DNA
ggccgtgtggcctaatggataaggcgtctgacttcggatcaaaagattgcaggtttgagttctgccacggtcg

SEQ ID NO: 43 - DNA, 85 bp, synthetic construct
  misc_feature 1..85: note = Description of sequence: transcripted tRNA sequence; tRNA name: Ala_AGC_chr6:28763741-28763812 (-)
  source 1..85: mol_type = other DNA
ggctccgtggcgcaatggatagcgcattggacttctagaggctgaaggcattcaaaggttccgggttcgagtcccggcggagtcg

SEQ ID NO: 44 - DNA, 88 bp, synthetic construct
  misc_feature 1..88: note = Description of sequence: transcripted tRNA sequence; tRNA name: Ala_AGC_chr6:28763741-28763812 (-)
  source 1..88: mol_type = other DNA
ggctctgtggcgcaatggatagcgcattggacttctagtgacgaatagagcaattcaaaggttgtgggttcgaatcccaccagagtcg

SEQ ID NO: 45 - DNA, 91 bp, synthetic construct
  misc_feature 1..91: note = Description of sequence: transcripted tRNA sequence; tRNA name: Ala_AGC_chr6:28763741-28763812 (-)
  source 1..91: mol_type = other DNA
ggctctgtggcgcaatggatagcgcattggacttctagctgagcctagtgtggtcattcaaaggttgtgggttcgagtcccaccagagtcg

SEQ ID NO: 46 - DNA, 86 bp, synthetic construct
  misc_feature 1..86: note = Description of sequence: transcripted tRNA sequence; tRNA name: Ala_AGC_chr6:28763741-28763812 (-)
  source 1..86: mol_type = other DNA
ggctctgtggcgcaatggatagcgcattggacttctagatagttagagaaattcaaaggttgtgggttcgagtcccaccagagtcg

SEQ ID NO: 47 - DNA, 74 bp, synthetic construct
  misc_feature 1..74: note = Description of sequence: transcripted tRNA sequence; tRNA name: Ala_AGC_chr6:28763741-28763812 (-)
  source 1..74: mol_type = other DNA
gtctctgtggcgcaatggacgagcgcgctggacttctaatccagaggttccgggttcgagtcccggcagagatg

SEQ ID NO: 48 - DNA, 87 bp, synthetic construct
  misc_feature 1..87: note = Description of sequence: transcripted tRNA sequence; tRNA name: Ala_AGC_chr6:28763741-28763812 (-)
  source 1..87: mol_type = other DNA
ggctctgtggcgcaatggatagcgcattggacttctagcctaaatcaagagattcaaaggttgcgggttcgagtccctccagagtcg

SEQ ID NO: 49 - DNA, 74 bp, synthetic construct
  misc_feature 1..74: note = Description of sequence: transcripted tRNA sequence; tRNA name: Ala_AGC_chr6:28763741-28763812 (-)
  source 1..74: mol_type = other DNA
gtctctgtggcgcaatcggttagcgcgttcggctgttaaccgaaaggttggtggttcgatcccacccagggacg

SEQ ID NO: 50 - DNA, 74 bp, synthetic construct
  misc_feature 1..74: note = Description of sequence: transcripted tRNA sequence; tRNA name: Ala_AGC_chr6:28763741-28763812 (-)
  source 1..74: mol_type = other DNA
gtctctgtggcgcaatcggctagcgcgtttggctgttaactaaaaggttggcggttcgaacccacccagaggcg

SEQ ID NO: 51 - DNA, 74 bp, synthetic construct
  misc_feature 1..74: note = Description of sequence: transcripted tRNA sequence; tRNA name: Ala_AGC_chr6:28763741-28763812 (-)
  source 1..74: mol_type = other DNA
gtctctgtggtgcaatcggttagcgcgttccgctgttaaccgaaagcttggtggttcgagcccacccagggatg

SEQ ID NO: 52 - DNA, 74 bp, synthetic construct
  misc_feature 1..74: note = Description of sequence: transcripted tRNA sequence; tRNA name: Ala_AGC_chr6:28763741-28763812 (-)
  source 1..74: mol_type = other DNA
gtctctgtggcgcaatcggctagcgcgtttggctgttaactaaaaagttggtggttcgaacacacccagaggcg

SEQ ID NO: 53 - DNA, 74 bp, synthetic construct
  misc_feature 1..74: note = Description of sequence: transcripted tRNA sequence; tRNA name: Ala_AGC_chr6:28763741-28763812 (-)
  source 1..74: mol_type = other DNA
gtctctgtggcgcaatcggttagcgcgttcggctgttaaccgaaaggttggtggttcgagcccacccagggacg

SEQ ID NO: 54 - DNA, 74 bp, synthetic construct
  misc_feature 1..74: note = Description of sequence: transcripted tRNA sequence; tRNA name: Ala_AGC_chr6:28763741-28763812 (-)
  source 1..74: mol_type = other DNA
gtctctgtggcgcaatcggttagcgcattcggctgttaaccgaaaggttggtggttcgagcccacccagggacg

SEQ ID NO: 55 - DNA, 74 bp, synthetic construct
  misc_feature 1..74: note = Description of sequence: transcripted tRNA sequence; tRNA name: Ala_AGC_chr6:28763741-28763812 (-)
  source 1..74: mol_type = other DNA
gtctctgtggcgcaatcggttagcgcgttcggctgttaaccgaaagattggtggttcgagcccacccagggacg

SEQ ID NO: 56 - DNA, 74 bp, synthetic construct
  misc_feature 1..74: note = Description of sequence: transcripted tRNA sequence; tRNA name: Ala_AGC_chr6:28763741-28763812 (-)
  source 1..74: mol_type = other DNA
gtctctgtggcgcaatcggttagcgcgttcggctgttaactgaaaggttggtggttcgagcccacccagggacg

SEQ ID NO: 57 - DNA, 74 bp, synthetic construct
  misc_feature 1..74: note = Description of sequence: transcripted tRNA sequence; tRNA name: Ala_AGC_chr6:28763741-28763812 (-)
  source 1..74: mol_type = other DNA
gtctctgtggcgcaatgggttagcgcgttcggctgttaaccgaaaggttggtggttcgagcccatccagggacg

SEQ ID NO: 58 - DNA, 74 bp, synthetic construct
  misc_feature 1..74: note = Description of sequence: transcripted tRNA sequence; tRNA name: Ala_AGC_chr6:28763741-28763812 (-)
  source 1..74: mol_type = other DNA
gtctctgtggcgtagtcggttagcgcgttcggctgttaaccgaaaagttggtggttcgagcccacccaggaacg

SEQ ID NO: 59 - DNA, 74 bp, synthetic construct
  misc_feature 1..74: note = Description of sequence: transcripted tRNA sequence; tRNA name: Ala_AGC_chr6:28763741-28763812 (-)
  source 1..74: mol_type = other DNA
gtctctgtggcgcaatcggctagcgcgtttggctgttaactaaaaggttggtggttcgaacccacccagaggcg

SEQ ID NO: 60 - DNA, 74 bp, synthetic construct
  misc_feature 1..74: note = Description of sequence: transcripted tRNA sequence; tRNA name: Ala_AGC_chr6:28763741-28763812 (-)
  source 1..74: mol_type = other DNA
gtctctgtggcgcaatcggttagcgcgttcggctgttaactgaaaggttagtggttcgagcccacccggggacg

SEQ ID NO: 61 - DNA, 72 bp, synthetic construct
  misc_feature 1..72: note = Description of sequence: transcripted tRNA sequence; tRNA name: Ala_AGC_chr6:28763741-28763812 (-)
  source 1..72: mol_type = other DNA
tcctcgttagtatagtggttagtatccccgcctgtcacgcgggagaccggggttcaattccccgacggggag

SEQ ID NO: 62 - DNA, 72 bp, synthetic construct
  misc_feature 1..72: note = Description of sequence: transcripted tRNA sequence; tRNA name: Ala_AGC_chr6:28763741-28763812 (-)
  source 1..72: mol_type = other DNA
tcctcgttagtatagtggtgagtatccccgcctgtcacgcgggagaccggggttcgattccccgacggggag

SEQ ID NO: 63 - DNA, 72 bp, synthetic construct
  misc_feature 1..72: note = Description of sequence: transcripted tRNA sequence; tRNA name: Ala_AGC_chr6:28763741-28763812 (-)
  source 1..72: mol_type = other DNA
tcctcgttagtatagtggtgagtgtccccgtctgtcacgcgggagaccggggttcgattccccgacggggag

SEQ ID NO: 64 - DNA, 72 bp, synthetic construct
  misc_feature 1..72: note = Description of sequence: transcripted tRNA sequence; tRNA name: Ala_AGC_chr6:28763741-28763812 (-)
  source 1..72: mol_type = other DNA
gggggcatagctcagtggtagagcatttgactgcagatcaagaggtccctggttcaaatccaggtgccccct

SEQ ID NO: 65 - DNA, 72 bp, synthetic construct
  misc_feature 1..72: note = Description of sequence: transcripted tRNA sequence; tRNA name: Ala_AGC_chr6:28763741-28763812 (-)
  source 1..72: mol_type = other DNA
gggggtatagctcaggggtagagcatttgactgcagatcaagaggtccctggttcaaatccaggtgcccccc

SEQ ID NO: 66 - DNA, 72 bp, synthetic construct
  misc_feature 1..72: note = Description of sequence: transcripted tRNA sequence; tRNA name: Ala_AGC_chr6:28763741-28763812 (-)
  source 1..72: mol_type = other DNA
gggggtatagcttagcggtagagcatttgactgcagatcaagaggtccccggttcaaatccgggtgccccct

SEQ ID NO: 67 - DNA, 72 bp, synthetic construct
  misc_feature 1..72: note = Description of sequence: transcripted tRNA sequence; tRNA name: Ala_AGC_chr6:28763741-28763812 (-)
  source 1..72: mol_type = other DNA
gggggtatagcttaggggtagagcatttgactgcagatcaaaaggtccctggttcaaatccaggtgcccctt

SEQ ID NO: 68 - DNA, 72 bp, synthetic construct
  misc_feature 1..72: note = Description of sequence: transcripted tRNA sequence; tRNA name: Ala_AGC_chr6:28763741-28763812 (-)
  source 1..72: mol_type = other DNA
gggggtatagctcaggggtagagcatttgactgcagatcaagaggtccccagttcaaatctgggtgccccct

SEQ ID NO: 69 - DNA, 72 bp, synthetic construct
  misc_feature 1..72: note = Description of sequence: transcripted tRNA sequence; tRNA name: Ala_AGC_chr6:28763741-28763812 (-)
  source 1..72: mol_type = other DNA
gggggtatagctcaggggtagagcatttgactgcagatcaagaagtccccggttcaaatccgggtgccccct

SEQ ID NO: 70 - DNA, 72 bp, synthetic construct
  misc_feature 1..72: note = Description of sequence: transcripted tRNA sequence; tRNA name: Ala_AGC_chr6:28763741-28763812 (-)
  source 1..72: mol_type = other DNA
gggggtatagctcaggggtagagcatttgactgcagatcaagaggtctctggttcaaatccaggtgccccct

SEQ ID NO: 71 - DNA, 72 bp, synthetic construct
  misc_feature 1..72: note = Description of sequence: transcripted tRNA sequence; tRNA name: Ala_AGC_chr6:28763741-28763812 (-)
  source 1..72: mol_type = other DNA
gggggtatagctcaggggtagagcacttgactgcagatcaagaagtccttggttcaaatccaggtgccccct

SEQ ID NO: 72 - DNA, 72 bp, synthetic construct
  misc_feature 1..72: note = Description of sequence: transcripted tRNA sequence; tRNA name: Ala_AGC_chr6:28763741-28763812 (-)
  source 1..72: mol_type = other DNA
ggggatatagctcaggggtagagcatttgactgcagatcaagaggtccccggttcaaatccgggtgcccccc

SEQ ID NO: 73 - DNA, 72 bp, synthetic construct
  misc_feature 1..72: note = Description of sequence: transcripted tRNA sequence; tRNA name: Ala_AGC_chr6:28763741-28763812 (-)
  source 1..72: mol_type = other DNA
gggggtatagttcaggggtagagcatttgactgcagatcaagaggtccctggttcaaatccaggtgccccct

SEQ ID NO: 74 - DNA, 72 bp, synthetic construct
  misc_feature 1..72: note = Description of sequence: transcripted tRNA sequence; tRNA name: Ala_AGC_chr6:28763741-28763812 (-)
  source 1..72: mol_type = other DNA
gggggtatagctcaggggtagagcatttgactgcaaatcaagaggtccctgattcaaatccaggtgccccct

SEQ ID NO: 75 - DNA, 72 bp, synthetic construct
  misc_feature 1..72: note = Description of sequence: transcripted tRNA sequence; tRNA name: Ala_AGC_chr6:28763741-28763812 (-)
  source 1..72: mol_type = other DNA
gggggtatagctcagtggtagagcatttgactgcagatcaagaggtccccggttcaaatccgggtgccccct

SEQ ID NO: 76 - DNA, 72 bp, synthetic construct
  misc_feature 1..72: note = Description of sequence: transcripted tRNA sequence; tRNA name: Ala_AGC_chr6:28763741-28763812 (-)
  source 1..72: mol_type = other DNA
gggcgtatagctcaggggtagagcatttgactgcagatcaagaggtccccagttcaaatctgggtgccccct

SEQ ID NO: 77 - DNA, 72 bp, synthetic construct
  misc_feature 1..72: note = Description of sequence: transcripted tRNA sequence; tRNA name: Ala_AGC_chr6:28763741-28763812 (-)
  source 1..72: mol_type = other DNA
gggggtatagctcacaggtagagcatttgactgcagatcaagaggtccccggttcaaatctgggtgccccct

SEQ ID NO: 78 - DNA, 70 bp, synthetic construct
  misc_feature 1..70: note = Description of sequence: transcripted tRNA sequence; tRNA name: Ala_AGC_chr6:28763741-28763812 (-)
  source 1..70: mol_type = other DNA
gggcgtatagctcaggggtagagcatttgactgcagatcaagaggtccccagttcaaatctgggtgccca

SEQ ID NO: 79 - DNA, 72 bp, synthetic construct
  misc_feature 1..72: note = Description of sequence: transcripted tRNA sequence; tRNA name: Ala_AGC_chr6:28763741-28763812 (-)
  source 1..72: mol_type = other DNA
gggggtatagctcacaggtagagcatttgactgcagatcaagaggtccccggttcaaatccggttactccct

SEQ ID NO: 80 - DNA, 72 bp, synthetic construct
  misc_feature 1..72: note = Description of sequence: transcripted tRNA sequence; tRNA name: Ala_AGC_chr6:28763741-28763812 (-)
  source 1..72: mol_type = other DNA
gggggtatagctcaggggtagagcacttgactgcagatcaagaggtccctggttcaaatccaggtgccccct

SEQ ID NO: 81 - DNA, 72 bp, synthetic construct
  misc_feature 1..72: note = Description of sequence: transcripted tRNA sequence; tRNA name: Ala_AGC_chr6:28763741-28763812 (-)
  source 1..72: mol_type = other DNA
gggggtatagctcagtggtagagcatttgactgcagatcaagaggtccctggttcaaatccgggtgccccct

SEQ ID NO: 82 - DNA, 73 bp, synthetic construct
  misc_feature 1..73: note = Description of sequence: transcripted tRNA sequence; tRNA name: Ala_AGC_chr6:28763741-28763812 (-)
  source 1..73: mol_type = other DNA
gggggtatagctcagtgggtagagcatttgactgcagatcaagaggtccccggttcaaatccgggtgccccct

SEQ ID NO: 83 - DNA, 72 bp, synthetic construct
  misc_feature 1..72: note = Description of sequence: transcripted tRNA sequence; tRNA name: Ala_AGC_chr6:28763741-28763812 (-)
  source 1..72: mol_type = other DNA
gggggtgtagctcagtggtagagcatttgactgcagatcaagaggtccctggttcaaatccaggtgccccct

SEQ ID NO: 84 - DNA, 73 bp, synthetic construct
  misc_feature 1..73: note = Description of sequence: transcripted tRNA sequence; tRNA name: Ala_AGC_chr6:28763741-28763812 (-)
  source 1..73: mol_type = other DNA
gggggtatagctcaggtggtagagcatttgactgcagatcaagaggtccccggttcaaatccgggtgccccct

SEQ ID NO: 85 - DNA, 72 bp, synthetic construct
  misc_feature 1..72: note = Description of sequence: transcripted tRNA sequence; tRNA name: Ala_AGC_chr6:28763741-28763812 (-)
  source 1..72: mol_type = other DNA
gggggtatagctcaggggtagagcatttgactgcagatcaagaggtccccggttcaaatccgggtgccccct

SEQ ID NO: 86 - DNA, 72 bp, synthetic construct
  misc_feature 1..72: note = Description of sequence: transcripted tRNA sequence; tRNA name: Ala_AGC_chr6:28763741-28763812 (-)
  source 1..72: mol_type = other DNA
gggggtatagctcaggggtagagcatttgactgcagatcaagaggtccctggttcaaatccaggtgccccct

SEQ ID NO: 87 - DNA, 72 bp, synthetic construct
  misc_feature 1..72: note = Description of sequence: transcripted tRNA sequence; tRNA name: Ala_AGC_chr6:28763741-28763812 (-)
  source 1..72: mol_type = other DNA
ggttccatggtgtaatggttagcactctggactctgaatccagcgatccgagttcaaatctcggtggaacct

SEQ ID NO: 88 - DNA, 72 bp, synthetic construct
  misc_feature 1..72: note = Description of sequence: transcripted tRNA sequence; tRNA name: Ala_AGC_chr6:28763741-28763812 (-)
  source 1..72: mol_type = other DNA
ggttccatggtgtaatggttagcactctggactctgaatccagcgatccgagttcaagtctcggtggaacct

SEQ ID NO: 89 - DNA, 72 bp, synthetic construct
  misc_feature 1..72: note = Description of sequence: transcripted tRNA sequence; tRNA name: Ala_AGC_chr6:28763741-28763812 (-)
  source 1..72: mol_type = other DNA
ggttccatggtgtaatggtgagcactctggactctgaatccagcgatccgagttcgagtctcggtggaacct

SEQ ID NO: 90 - DNA, 72 bp, synthetic construct
  misc_feature 1..72: note = Description of sequence: transcripted tRNA sequence; tRNA name: Ala_AGC_chr6:28763741-28763812 (-)
  source 1..72: mol_type = other DNA
ggttccatggtgtaatggtaagcactctggactctgaatccagcgatccgagttcgagtctcggtggaacct

SEQ ID NO: 91 - DNA, 72 bp, synthetic construct
  misc_feature 1..72: note = Description of sequence: transcripted tRNA sequence; tRNA name: Ala_AGC_chr6:28763741-28763812 (-)
  source 1..72: mol_type = other DNA
ggttccatggtgtaatggttagcactctggactctgaatccggtaatccgagttcaaatctcggtggaacct

SEQ ID NO: 92 - DNA, 72 bp, synthetic construct
  misc_feature 1..72: note = Description of sequence: transcripted tRNA sequence; tRNA name: Ala_AGC_chr6:28763741-28763812 (-)
  source 1..72: mol_type = other DNA
ggccccatggtgtaatggtcagcactctggactctgaatccagcgatccgagttcaaatctcggtgggaccc

SEQ ID NO: 93 - DNA, 72 bp, synthetic construct
  misc_feature 1..72: note = Description of sequence: transcripted tRNA sequence; tRNA name: Ala_AGC_chr6:28763741-28763812 (-)
  source 1..72: mol_type = other DNA
ggttccatggtgtaatggtaagcactctggactctgaatccagccatctgagttcgagtctctgtggaacct

SEQ ID NO: 94 - DNA, 72 bp, synthetic construct
  misc_feature 1..72: note = Description of sequence: transcripted tRNA sequence; tRNA name: Ala_AGC_chr6:28763741-28763812 (-)
  source 1..72: mol_type = other DNA
ggtcccatggtgtaatggttagcactctggactttgaatccagcgatccgagttcaaatctcggtgggacct

SEQ ID NO: 95 - DNA, 72 bp, synthetic construct
  misc_feature 1..72: note = Description of sequence: transcripted tRNA sequence; tRNA name: Ala_AGC_chr6:28763741-28763812 (-)
  source 1..72: mol_type = other DNA
ggtcccatggtgtaatggttagcactctggactttgaatccagcaatccgagttcgaatctcggtgggacct

SEQ ID NO: 96 - DNA, 72 bp, synthetic construct
  misc_feature 1..72: note = Description of sequence: transcripted tRNA sequence; tRNA name: Ala_AGC_chr6:28763741-28763812 (-)
  source 1..72: mol_type = other DNA
ggccccatggtgtaatggttagcactctggactttgaatccagcgatccgagttcaaatctcggtgggacct

SEQ ID NO: 97 - DNA, 72 bp, synthetic construct
  misc_feature 1..72: note = Description of sequence: transcripted tRNA sequence; tRNA name: Ala_AGC_chr6:28763741-28763812 (-)
  source 1..72: mol_type = other DNA
ggtcccatggtgtaatggttagcactctgggctttgaatccagcaatccgagttcgaatcttggtgggacct

SEQ ID NO: 98 - DNA, 72 bp, synthetic construct
  misc_feature 1..72: note = Description of sequence: transcripted tRNA sequence; tRNA name: Ala_AGC_chr6:28763741-28763812 (-)
  source 1..72: mol_type = other DNA
tccctggtggtctagtggttaggattcggcgctctcaccgccgcggcccgggttcgattcccggtcagggaa

SEQ ID NO: 99 - DNA, 72 bp, synthetic construct
  misc_feature 1..72: note = Description of sequence: transcripted tRNA sequence; tRNA name: Ala_AGC_chr6:28763741-28763812 (-)
  source 1..72: mol_type = other DNA
tccctggtggtctagtggttaggattcggcgctctcaccgccgcggcccgggttcgattcccggtcaggaaa

SEQ ID NO: 100 - DNA, 72 bp, synthetic construct
  misc_feature 1..72: note = Description of sequence: transcripted tRNA sequence; tRNA name: Ala_AGC_chr6:28763741-28763812 (-)
  source 1..72: mol_type = other DNA
tcccatatggtctagcggttaggattcctggttttcacccaggtggcccgggttcgactcccggtatgggaa

SEQ ID NO: 101 - DNA, 72 bp, synthetic construct
  misc_feature 1..72: note = Description of sequence: transcripted tRNA sequence; tRNA name: Ala_AGC_chr6:28763741-28763812 (-)
  source 1..72: mol_type = other DNA
tcccacatggtctagcggttaggattcctggttttcacccaggcggcccgggttcgactcccggtgtgggaa

SEQ ID NO: 102 - DNA, 72 bp, synthetic construct
  misc_feature 1..72: note = Description of sequence: transcripted tRNA sequence; tRNA name: Ala_AGC_chr6:28763741-28763812 (-)
  source 1..72: mol_type = other DNA
tccctggtggtctagtggctaggattcggcgctttcaccgccgcggcccgggttcgattcccggccagggaa

SEQ ID NO: 103 - DNA, 72 bp, synthetic construct
  misc_feature 1..72: note = Description of sequence: transcripted tRNA sequence; tRNA name: Ala_AGC_chr6:28763741-28763812 (-)
  source 1..72: mol_type = other DNA
tccctggtggtctagtggctaggattcggcgctttcaccgccgcggcccgggttcgattcccggtcagggaa

SEQ ID NO: 104 - DNA, 71 bp, synthetic construct
  misc_feature 1..71: note = Description of sequence: transcripted tRNA sequence; tRNA name: Ala_AGC_chr6:28763741-28763812 (-)
  source 1..71: mol_type = other DNA
gcattggtggttcagtggtagaattctcgcctcccacgcgggagacccgggttcaattcccggccaatgca

SEQ ID NO: 105 - DNA, 71 bp, synthetic construct
  misc_feature 1..71: note = Description of sequence: transcripted tRNA sequence; tRNA name: Ala_AGC_chr6:28763741-28763812 (-)
  source 1..71: mol_type = other DNA
gcgccgctggtgtagtggtatcatgcaagattcccattcttgcgacccgggttcgattcccgggcggcgca

SEQ ID NO: 106 - DNA, 71 bp, synthetic construct
  misc_feature 1..71: note = Description of sequence: transcripted tRNA sequence; tRNA name: Ala_AGC_chr6:28763741-28763812 (-)
  source 1..71: mol_type = other DNA
gcattggtggttcaatggtagaattctcgcctcccacgcaggagacccaggttcgattcctggccaatgca

SEQ ID NO: 107 - DNA, 71 bp, synthetic construct
  misc_feature 1..71: note = Description of sequence: transcripted tRNA sequence; tRNA name: Ala_AGC_chr6:28763741-28763812 (-)
  source 1..71: mol_type = other DNA
gcatgggtggttcagtggtagaattctcgcctgccacgcgggaggcccgggttcgattcccggcccatgca

SEQ ID NO: 108 - DNA, 71 bp, synthetic construct
  misc_feature 1..71: note = Description of sequence: transcripted tRNA sequence; tRNA name: Ala_AGC_chr6:28763741-28763812 (-)
  source 1..71: mol_type = other DNA
gcattggtggttcagtggtagaattctcgcctgccacgcgggaggcccgggttcgattcccggccaatgca

SEQ ID NO: 109 - DNA, 71 bp, synthetic construct
  misc_feature 1..71: note = Description of sequence: transcripted tRNA sequence; tRNA name: Ala_AGC_chr6:28763741-28763812 (-)
  source 1..71: mol_type = other DNA
gcattggtggttcagtggtagaattctcgcctgccacgcgggaggcccgggtttgattcccggccagtgca

SEQ ID NO: 110 - DNA, 71 bp, synthetic construct
  misc_feature 1..71: note = Description of sequence: transcripted tRNA sequence; tRNA name: Ala_AGC_chr6:28763741-28763812 (-)
  source 1..71: mol_type = other DNA
gcataggtggttcagtggtagaattcttgcctgccacgcaggaggcccaggtttgattcctggcccatgca

SEQ ID NO: 111 - DNA, 71 bp, synthetic construct
  misc_feature 1..71: note = Description of sequence: transcripted tRNA sequence; tRNA name: Ala_AGC_chr6:28763741-28763812 (-)
  source 1..71: mol_type = other DNA
gcattggtggttcagtggtagaattctcgcctgccatgcgggcggccgggcttcgattcctggccaatgca

SEQ ID NO: 112 - DNA, 72 bp, synthetic construct
  misc_feature 1..72: note = Description of sequence: transcripted tRNA sequence; tRNA name: Ala_AGC_chr6:28763741-28763812 (-)
  source 1..72: mol_type = other DNA
gcgttggtggtatagtggttagcatagctgccttccaagcagttgacccgggttcgattcccggccaacgca

SEQ ID NO: 113 - DNA, 72 bp, synthetic construct
  misc_feature 1..72: note = Description of sequence: transcripted tRNA sequence; tRNA name: Ala_AGC_chr6:28763741-28763812 (-)
  source 1..72: mol_type = other DNA
gcgttggtggtatagtggtgagcatagctgccttccaagcagttgacccgggttcgattcccggccaacgca

SEQ ID NO: 114 - DNA, 72 bp, synthetic construct
  misc_feature 1..72: note = Description of sequence: transcripted tRNA sequence; tRNA name: Ala_AGC_chr6:28763741-28763812 (-)
  source 1..72: mol_type = other DNA
gcgttggtggtatagtggtaagcatagctgccttccaagcagttgacccgggttcgattcccggccaacgca

SEQ ID NO: 115 - DNA, 72 bp, synthetic construct
  misc_feature 1..72: note = Description of sequence: transcripted tRNA sequence; tRNA name: Ala_AGC_chr6:28763741-28763812 (-)
  source 1..72: mol_type = other DNA
gcgttggtggtatagtggtgagcatagttgccttccaagcagttgacccgggctcgattcccgcccaacgca

SEQ ID NO: 116 - DNA, 72 bp, synthetic construct
  misc_feature 1..72: note = Description of sequence: transcripted tRNA sequence; tRNA name: Ala_AGC_chr6:28763741-28763812 (-)
  source 1..72: mol_type = other DNA
gccgtgatcgtatagtggttagtactctgcgttgtggccgcagcaacctcggttcgaatccgagtcacggca

SEQ ID NO: 117 - DNA, 72 bp, synthetic construct
  misc_feature 1..72: note = Description of sequence: transcripted tRNA sequence; tRNA name: Ala_AGC_chr6:28763741-28763812 (-)
  source 1..72: mol_type = other DNA
gccatgatcgtatagtggttagtactctgcgctgtggccgcagcaacctcggttcgaatccgagtcacggca

SEQ ID NO: 118 - DNA, 74 bp, synthetic construct
  misc_feature 1..74: note = Description of sequence: transcripted tRNA sequence; tRNA name: Ala_AGC_chr6:28763741-28763812 (-)
  source 1..74: mol_type = other DNA
ggccggttagctcagttggttagagcgtggcgctaataacgccaaggtcgcgggttcgatccccgtacgggcca

SEQ ID NO: 119 - DNA, 74 bp, synthetic construct
  misc_feature 1..74: note = Description of sequence: transcripted tRNA sequence; tRNA name: Ala_AGC_chr6:28763741-28763812 (-)
  source 1..74: mol_type = other DNA
ggccggttagctcagttggttagagcgtggtgctaataacgccaaggtcgcgggttcgatccccgtactggcca

SEQ ID NO: 120 - DNA, 74 bp, synthetic construct
  misc_feature 1..74: note = Description of sequence: transcripted tRNA sequence; tRNA name: Ala_AGC_chr6:28763741-28763812 (-)
  source 1..74: mol_type = other DNA
ggctggttagctcagttggttagagcgtggtgctaataacgccaaggtcgcgggttcgatccccgtactggcca

SEQ ID NO: 121 - DNA, 74 bp, synthetic construct
  misc_feature 1..74: note = Description of sequence: transcripted tRNA sequence; tRNA name: Ala_AGC_chr6:28763741-28763812 (-)
  source 1..74: mol_type = other DNA
ggccggttagctcagttggttagagcgtggtgctaataacgccaaggtcgcgggttcgaaccccgtacgggcca

SEQ ID NO: 122 - DNA, 74 bp, synthetic construct
  misc_feature 1..74: note = Description of sequence: transcripted tRNA sequence; tRNA name: Ala_AGC_chr6:28763741-28763812 (-)
  source 1..74: mol_type = other DNA
ggccggttagctcagttggttagagcgtggtgctaataacgccaaggtcgcgggttcgatccccgtacgggcca

SEQ ID NO: 123 - DNA, 74 bp, synthetic construct
  misc_feature 1..74: note = Description of sequence: transcripted tRNA sequence; tRNA name: Ala_AGC_chr6:28763741-28763812 (-)
  source 1..74: mol_type = other DNA
ggccggttagctcagttggttagagcgtggtgctaataacgctaaggtcgcgggttcgatccccgtactggcca

SEQ ID NO: 124 - DNA, 74 bp, synthetic construct
  misc_feature 1..74: note = Description of sequence: transcripted tRNA sequence; tRNA name: Ala_AGC_chr6:28763741-28763812 (-)
  source 1..74: mol_type = other DNA
ggccggttagctcagttggtcagagcgtggtgctaataacgccaaggtcgcgggttcgatccccgtacgggcca

SEQ ID NO: 125 - DNA, 74 bp, synthetic construct
  misc_feature 1..74: note = Description of sequence: transcripted tRNA sequence; tRNA name: Ala_AGC_chr6:28763741-28763812 (-)
  source 1..74: mol_type = other DNA
ggccggttagctcagtcggctagagcgtggtgctaataacgccaaggtcgcgggttcgatccccgtacgggcca

SEQ ID NO: 126 - DNA, 74 bp, synthetic construct
  misc_feature 1..74: note = Description of sequence: transcripted tRNA sequence; tRNA name: Ala_AGC_chr6:28763741-28763812 (-)
  source 1..74: mol_type = other DNA
ggctggttagttcagttggttagagcgtggtgctaataacgccaaggtcgtgggttcgatccccatatcggcca

SEQ ID NO: 127 - DNA, 74 bp, synthetic construct
  misc_feature 1..74: note = Description of sequence: transcripted tRNA sequence; tRNA name: Ala_AGC_chr6:28763741-28763812 (-)
  source 1..74: mol_type = other DNA
ggccggttagctcagttggtaagagcgtggtgctgataacaccaaggtcgcgggctcgactcccgcaccggcca

SEQ ID NO: 128 - DNA, 93 bp, synthetic construct
  misc_feature 1..93: note = Description of sequence: transcripted tRNA sequence; tRNA name: Ala_AGC_chr6:28763741-28763812 (-)
  source 1..93: mol_type = other DNA
gctccagtggcgcaatcggttagcgcgcggtacttatatgacagtgcgagcggagcaatgccgaggttgtgagttcgatcctcacctggagca

SEQ ID NO: 129 - DNA, 93 bp, synthetic construct
  misc_feature 1..93: note = Description of sequence: transcripted tRNA sequence; tRNA name: Ala_AGC_chr6:28763741-28763812 (-)
  source 1..93: mol_type = other DNA
gctccagtggcgcaatcggttagcgcgcggtacttatacagcagtacatgcagagcaatgccgaggttgtgagttcgagcctcacctggagca

SEQ ID NO: 130 - DNA, 94 bp, synthetic construct
  misc_feature 1..94: note = Description of sequence: transcripted tRNA sequence; tRNA name: Ala_AGC_chr6:28763741-28763812 (-)
  source 1..94: mol_type = other DNA
gctccagtggcgcaatcggttagcgcgcggtacttatatggcagtatgtgtgcgagtgatgccgaggttgtgagttcgagcctcacctggagca

SEQ ID NO: 131 - DNA, 94 bp, synthetic construct
  misc_feature 1..94: note = Description of sequence: transcripted tRNA sequence; tRNA name: Ala_AGC_chr6:28763741-28763812 (-)
  source 1..94: mol_type = other DNA
gctccagtggcgcaatcggttagcgcgcggtacttatacaacagtatatgtgcgggtgatgccgaggttgtgagttcgagcctcacctggagca

SEQ ID NO: 132 - DNA, 94 bp, synthetic construct
  misc_feature 1..94: note = Description of sequence: transcripted tRNA sequence; tRNA name: Ala_AGC_chr6:28763741-28763812 (-)
  source 1..94: mol_type = other DNA
gctccagtggcgcaatcggttagcgcgcggtacttataagacagtgcacctgtgagcaatgccgaggttgtgagttcaagcctcacctggagca

SEQ ID NO: 133 - DNA, 82 bp, synthetic construct
  misc_feature 1..82: note = Description of sequence: transcripted tRNA sequence; tRNA name: Ala_AGC_chr6:28763741-28763812 (-)
  source 1..82: mol_type = other DNA
ggtagcgtggccgagcggtctaaggcgctggattaaggctccagtctcttcggaggcgtgggttcgaatcccaccgctgcca

SEQ ID NO: 134 - DNA, 82 bp, synthetic construct
  misc_feature 1..82: note = Description of sequence: transcripted tRNA sequence; tRNA name: Ala_AGC_chr6:28763741-28763812 (-)
  source 1..82: mol_type = other DNA
ggtagcgtggccgagcggtctaaggcgctggattaaggctccagtctcttcgggggcgtgggttcgaatcccaccgctgcca

SEQ ID NO: 135 - DNA, 82 bp, synthetic construct
  misc_feature 1..82: note = Description of sequence: transcripted tRNA sequence; tRNA name: Ala_AGC_chr6:28763741-28763812 (-)
  source 1..82: mol_type = other DNA
ggtagcgtggccgagcggtctaaggcgctggattaaggctccagtctcttcgggggcgtgggttcaaatcccaccgctgcca

SEQ ID NO: 136 - DNA, 82 bp, synthetic construct
  misc_feature 1..82: note = Description of sequence: transcripted tRNA sequence; tRNA name: Ala_AGC_chr6:28763741-28763812 (-)
  source 1..82: mol_type = other DNA
ggtagcgtggccgagtggtctaagacgctggattaaggctccagtctcttcgggggcgtgggtttgaatcccaccgctgcca

SEQ ID NO: 137 - DNA, 106 bp, synthetic construct
  misc_feature 1..106: note = Description of sequence: transcripted tRNA sequence; tRNA name: Ala_AGC_chr6:28763741-28763812 (-)
  source 1..106: mol_type = other DNA
gtcaggatggccgagtggtctaaggcgccagactcaagctaagcttcctccgcggtggggattctggtctccaatggaggcgtgggttcgaatcccacttctgaca

SEQ ID NO: 138 - DNA, 105 bp, synthetic construct
  misc_feature 1..105: note = Description of sequence: transcripted tRNA sequence; tRNA name: Ala_AGC_chr6:28763741-28763812 (-)
  source 1..105: mol_type = other DNA
gtcaggatggccgagtggtctaaggcgccagactcaagcttggcttcctcgtgttgaggattctggtctccaatggaggcgtgggttcgaatcccacttctgaca

SEQ ID NO: 139 - DNA, 108 bp, synthetic construct
  misc_feature 1..108: note = Description of sequence: transcripted tRNA sequence; tRNA name: Ala_AGC_chr6:28763741-28763812 (-)
  source 1..108: mol_type = other DNA
gtcaggatggccgagtggtctaaggcgccagactcaagcttactgcttcctgtgttcgggtcttctggtctccgtatggaggcgtgggttcgaatcccacttctgaca

SEQ ID NO: 140 - DNA, 107 bp, synthetic construct
  misc_feature 1..107: note = Description of sequence: transcripted tRNA sequence; tRNA name: Ala_AGC_chr6:28763741-28763812 (-)
  source 1..107: mol_type = other DNA
gtcaggatggccgagtggtctaaggcgccagactcaagttgctacttcccaggtttggggcttctggtctccgcatggaggcgtgggttcgaatcccacttctgaca

SEQ ID NO: 141 - DNA, 106 bp, synthetic construct
  misc_feature 1..106: note = Description of sequence: transcripted tRNA sequence; tRNA name: Ala_AGC_chr6:28763741-28763812 (-)
  source 1..106: mol_type = other DNA
gtcaggatggccgagtggtctaaggcgccagactcaaggtaagcaccttgcctgcgggctttctggtctccggatggaggcgtgggttcgaatcccacttctgaca

SEQ ID NO: 142 - DNA, 74 bp, synthetic construct
  misc_feature 1..74: note = Description of sequence: transcripted tRNA sequence; tRNA name: Ala_AGC_chr6:28763741-28763812 (-)
  source 1..74: mol_type = other DNA
gcctccttagtgcagtaggtagcgcatcagtctcaaaatctgaatggtcctgagttcaagcctcagagggggca

SEQ ID NO: 143 - DNA, 84 bp, synthetic construct
  misc_feature 1..84: note = Description of sequence: transcripted tRNA sequence; tRNA name: Ala_AGC_chr6:28763741-28763812 (-)
  source 1..84: mol_type = other DNA
gtcaggatggccgagcagtcttaaggcgctgcgttcaaatcgcaccctccgctggaggcgtgggttcgaatcccacttttgaca

SEQ ID NO: 144 - DNA, 83 bp, synthetic construct
  misc_feature 1..83: note = Description of sequence: transcripted tRNA sequence; tRNA name: Ala_AGC_chr6:28763741-28763812 (-)
  source 1..83: mol_type = other DNA
gtcaggatggccgagcggtctaaggcgctgcgttcaggtcgcagtctcccctggaggcgtgggttcgaatcccactcctgaca

SEQ ID NO: 145 - DNA, 83 bp, synthetic construct
  misc_feature 1..83: note = Description of sequence: transcripted tRNA sequence; tRNA name: Ala_AGC_chr6:28763741-28763812 (-)
  source 1..83: mol_type = other DNA
gtcaggatggccgagcggtctaaggcgctgcgttcaggtcgcagtctcccctggaggcgtgggttcgaatcccacttctgaca

SEQ ID NO: 146 - DNA, 83 bp, synthetic construct
  misc_feature 1..83: note = Description of sequence: transcripted tRNA sequence; tRNA name: Ala_AGC_chr6:28763741-28763812 (-)
  source 1..83: mol_type = other DNA
accaggatggccgagtggttaaggcgttggacttaagatccaatggacatatgtccgcgtgggttcgaaccccactcctggta

SEQ ID NO: 147 - DNA, 83 bp, synthetic construct
  misc_feature 1..83: note = Description of sequence: transcripted tRNA sequence; tRNA name: Ala_AGC_chr6:28763741-28763812 (-)
  source 1..83: mol_type = other DNA
accgggatggccgagtggttaaggcgttggacttaagatccaatgggctggtgcccgcgtgggttcgaaccccactctcggta

SEQ ID NO: 148 - DNA, 83 bp, synthetic construct
  misc_feature 1..83: note = Description of sequence: transcripted tRNA sequence; tRNA name: Ala_AGC_chr6:28763741-28763812 (-)
  source 1..83: mol_type = other DNA
accagaatggccgagtggttaaggcgttggacttaagatccaatggattcatatccgcgtgggttcgaaccccacttctggta

SEQ ID NO: 149 - DNA, 83 bp, synthetic construct
  misc_feature 1..83: note = Description of sequence: transcripted tRNA sequence; tRNA name: Ala_AGC_chr6:28763741-28763812 (-)
  source 1..83: mol_type = other DNA
accgggatggctgagtggttaaggcgttggacttaagatccaatggacaggtgtccgcgtgggttcgagccccactcccggta

SEQ ID NO: 150 - DNA, 82 bp, synthetic construct
  misc_feature 1..82: note = Description of sequence: transcripted tRNA sequence; tRNA name: Ala_AGC_chr6:28763741-28763812 (-)
  source 1..82: mol_type = other DNA
ggtagcgtggccgagcggtctaaggcgctggatttaggctccagtctcttcggaggcgtgggttcgaatcccaccgctgcca

SEQ ID NO: 151 - DNA, 82 bp, synthetic construct
  misc_feature 1..82: note = Description of sequence: transcripted tRNA sequence; tRNA name: Ala_AGC_chr6:28763741-28763812 (-)
  source 1..82: mol_type = other DNA
ggtagtgtggccgagcggtctaaggcgctggatttaggctccagtctcttcgggggcgtgggttcgaatcccaccactgcca

SEQ ID NO: 152 - DNA, 82 bp, synthetic construct
  misc_feature 1..82: note = Description of sequence: transcripted tRNA sequence; tRNA name: Ala_AGC_chr6:28763741-28763812 (-)
  source 1..82: mol_type = other DNA
ggtagcgtggccgagtggtctaaggcgctggatttaggctccagtcatttcgatggcgtgggttcgaatcccaccgctgcca

SEQ ID NO: 153 - DNA, 73 bp, synthetic construct
  misc_feature 1..73: note = Description of sequence: transcripted tRNA sequence; tRNA name: Ala_AGC_chr6:28763741-28763812 (-)
  source 1..73: mol_type = other DNA
gcccggctagctcagtcggtagagcatgggactcttaatcccagggtcgtgggttcgagccccacgttgggcg

SEQ ID NO: 154 - DNA, 73 bp, synthetic construct
  misc_feature 1..73: note = Description of sequence: transcripted tRNA sequence; tRNA name: Ala_AGC_chr6:28763741-28763812 (-)
  source 1..73: mol_type = other DNA
gcccagctagctcagtcggtagagcataagactcttaatctcagggttgtggattcgtgccccatgctgggtg

SEQ ID NO: 155 - DNA, 74 bp, synthetic construct
  misc_feature 1..74: note = Description of sequence: transcripted tRNA sequence; tRNA name: Ala_AGC_chr6:28763741-28763812 (-)
  source 1..74: mol_type = other DNA
gcagctagctcagtcggtagagcatgagactcttaatctcagggtcatgggttcgtgccccatgttgggtgcca

SEQ ID NO: 156 - DNA, 73 bp, synthetic construct
  misc_feature 1..73: note = Description of sequence: transcripted tRNA sequence; tRNA name: Ala_AGC_chr6:28763741-28763812 (-)
  source 1..73: mol_type = other DNA
gcccggctagctcagtcggtagagcatgagactcttaatctcagggtcgtgggttcgagccccacgttgggcg

SEQ ID NO: 157 - DNA, 73 bp, synthetic construct
  misc_feature 1..73: note = Description of sequence: transcripted tRNA sequence; tRNA name: Ala_AGC_chr6:28763741-28763812 (-)
  source 1..73: mol_type = other DNA
gcccggctagctcagtcggtagagcatgagacccttaatctcagggtcgtgggttcgagccccacgttgggcg

SEQ ID NO: 158 - DNA, 73 bp, synthetic construct
  misc_feature 1..73: note = Description of sequence: transcripted tRNA sequence; tRNA name: Ala_AGC_chr6:28763741-28763812 (-)
  source 1..73: mol_type = other DNA
gcccggctagctcagtcggtagagcatgggactcttaatctcagggtcgtgggttcgagccccacgttgggcg

SEQ ID NO: 159 - DNA, 73 bp, synthetic construct
  misc_feature 1..73: note = Description of sequence: transcripted tRNA sequence; tRNA name: Ala_AGC_chr6:28763741-28763812 (-)
  source 1..73: mol_type = other DNA
gcccggctagctcagtcgatagagcatgagactcttaatctcagggtcgtgggttcgagccgcacgttgggcg

SEQ ID NO: 160 - DNA, 73 bp, synthetic construct
  misc_feature 1..73: note = Description of sequence: transcripted tRNA sequence; tRNA name: Ala_AGC_chr6:28763741-28763812 (-)
  source 1..73: mol_type = other DNA
gcccagctagctcagtcggtagagcatgagactcttaatctcagggtcatgggtttgagccccacgtttggtg

SEQ ID NO: 161 - DNA, 73 bp, synthetic construct
  misc_feature 1..73: note = Description of sequence: transcripted tRNA sequence; tRNA name: Ala_AGC_chr6:28763741-28763812 (-)
  source 1..73: mol_type = other DNA
gcctggctagctcagtcggcaaagcatgagactcttaatctcagggtcgtgggctcgagctccatgttgggcg

SEQ ID NO: 162 - DNA, 73 bp, synthetic construct
  misc_feature 1..73: note = Description of sequence: transcripted tRNA sequence; tRNA name: Ala_AGC_chr6:28763741-28763812 (-)
  source 1..73: mol_type = other DNA
gcccgactacctcagtcggtggagcatgggactcttcatcccagggttgtgggttcgagccccacattgggca

SEQ ID NO: 163 - DNA, 73 bp, synthetic construct
  misc_feature 1..73: note = Description of sequence: transcripted tRNA sequence; tRNA name: Ala_AGC_chr6:28763741-28763812 (-)
  source 1..73: mol_type = other DNA
gcctggatagctcagttggtagagcatcagacttttaatctgagggtccagggttcaagtccctgttcaggca

SEQ ID NO: 164 - DNA, 73 bp, synthetic construct
  misc_feature 1..73: note = Description of sequence: transcripted tRNA sequence; tRNA name: Ala_AGC_chr6:28763741-28763812 (-)
  source 1..73: mol_type = other DNA
acccagatagctcagtcagtagagcatcagacttttaatctgagggtccaaggttcatgtccctttttgggtg

SEQ ID NO: 165 - DNA, 73 bp, synthetic construct
  misc_feature 1..73: note = Description of sequence: transcripted tRNA sequence; tRNA name: Ala_AGC_chr6:28763741-28763812 (-)
  source 1..73: mol_type = other DNA
gcctggatagctcagttggtagagcatcagacttttaatctgagggtccagggttcaagtccctgttcaggcg

SEQ ID NO: 166 - DNA, 73 bp, synthetic construct
  misc_feature 1..73: note = Description of sequence: transcripted tRNA sequence; tRNA name: Ala_AGC_chr6:28763741-28763812 (-)
  source 1..73: mol_type = other DNA
gcccggatagctcagtcggtagagcatcagacttttaatctgagggtccagggttcaagtccctgttcgggcg

SEQ ID NO: 167 - DNA, 73 bp, synthetic construct
  misc_feature 1..73: note = Description of sequence: transcripted tRNA sequence; tRNA name: Ala_AGC_chr6:28763741-28763812 (-)
  source 1..73: mol_type = other DNA
gcctggatagctcagtcggtagagcatcagacttttaatctgagggtccagggttcaagtccctgttcaggcg

SEQ ID NO: 168 - DNA, 73 bp, synthetic construct
  misc_feature 1..73: note = Description of sequence: transcripted tRNA sequence; tRNA name: Ala_AGC_chr6:28763741-28763812 (-)
  source 1..73: mol_type = other DNA
gcccggatagctcagtcggtagagcatcagacttttaatctgagggtccggggttcaagtccctgttcgggcg

SEQ ID NO: 169 - DNA, 73 bp, synthetic construct
  misc_feature 1..73: note = Description of sequence: transcripted tRNA sequence; tRNA name: Ala_AGC_chr6:28763741-28763812 (-)
  source 1..73: mol_type = other DNA
gcctgggtagctcagtcggtagagcatcagacttttaatctgagggtccagggttcaagtccctgtccaggcg

SEQ ID NO: 170 - DNA, 73 bp, synthetic construct
  misc_feature 1..73: note = Description of sequence: transcripted tRNA sequence; tRNA name: Ala_AGC_chr6:28763741-28763812 (-)
  source 1..73: mol_type = other DNA
gcctggatagctcagttggtagaacatcagacttttaatctgacggtgcagggttcaagtccctgttcaggcg

SEQ ID NO: 171 - DNA, 73 bp, synthetic construct
  misc_feature 1..73: note = Description of sequence: transcripted tRNA sequence; tRNA name: Ala_AGC_chr6:28763741-28763812 (-)
  source 1..73: mol_type = other DNA
gcctcgttagcgcagtaggtagcgcgtcagtctcataatctgaaggtcgtgagttcgatcctcacacggggca

SEQ ID NO: 172 - DNA, 73 bp, synthetic construct
  misc_feature 1..73: note = Description of sequence: transcripted tRNA sequence; tRNA name: Ala_AGC_chr6:28763741-28763812 (-)
  source 1..73: mol_type = other DNA
gccctcttagcgcagtgggcagcgcgtcagtctcataatctgaaggtcctgagttcgagcctcagagagggca

SEQ ID NO: 173 - DNA, 73 bp, synthetic construct
  misc_feature 1..73: note = Description of sequence: transcripted tRNA sequence; tRNA name: Ala_AGC_chr6:28763741-28763812 (-)
  source 1..73: mol_type = other DNA
gcctccttagcgcagtaggcagcgcgtcagtctcataatctgaaggtcctgagttcgaacctcagagggggca

SEQ ID NO: 174 - DNA, 73 bp, synthetic construct
  misc_feature 1..73: note = Description of sequence: transcripted tRNA sequence; tRNA name: Ala_AGC_chr6:28763741-28763812 (-)
  source 1..73: mol_type = other DNA
gccctcttagcgcagcgggcagcgcgtcagtctcataatctgaaggtcctgagttcgagcctcagagagggca

SEQ ID NO: 175 - DNA, 73 bp, synthetic construct
  misc_feature 1..73: note = Description of sequence: transcripted tRNA sequence; tRNA name: Ala_AGC_chr6:28763741-28763812 (-)
  source 1..73: mol_type = other DNA
gccctcttagcgcagctggcagcgcgtcagtctcataatctgaaggtcctgagttcaagcctcagagagggca

SEQ ID NO: 176 - DNA, 73 bp, synthetic construct
  misc_feature 1..73: note = Description of sequence: transcripted tRNA sequence; tRNA name: Ala_AGC_chr6:28763741-28763812 (-)
  source 1..73: mol_type = other DNA
gcctcgttagcgcagtaggcagcgcgtcagtctcataatctgaaggtcgtgagttcgagcctcacacggggca

SEQ ID NO: 177 - DNA, 73 bp, synthetic construct
  misc_feature 1..73: note = Description of sequence: transcripted tRNA sequence; tRNA name: Ala_AGC_chr6:28763741-28763812 (-)
  source 1..73: mol_type = other DNA
gccctcttagtgcagctggcagcgcgtcagtttcataatctgaaagtcctgagttcaagcctcagagagggca

SEQ ID NO: 178 - DNA, 73 bp, synthetic construct
  misc_feature 1..73: note = Description of sequence: transcripted tRNA sequence; tRNA name: Ala_AGC_chr6:28763741-28763812 (-)
  source 1..73: mol_type = other DNA
gccgaaatagctcagttgggagagcgttagactgaagatctaaaggtccctggttcgatcccgggtttcggca

SEQ ID NO: 179 - DNA, 73 bp, synthetic construct
  misc_feature 1..73: note = Description of sequence: transcripted tRNA sequence; tRNA name: Ala_AGC_chr6:28763741-28763812 (-)
  source 1..73: mol_type = other DNA
gccgaaatagctcagttgggagagcgttagactgaagatctaaaggtccctggttcaatcccgggtttcggca

SEQ ID NO: 180 - DNA, 73 bp, synthetic construct
  misc_feature 1..73: note = Description of sequence: transcripted tRNA sequence; tRNA name: Ala_AGC_chr6:28763741-28763812 (-)
  source 1..73: mol_type = other DNA
gccgagatagctcagttgggagagcgttagactgaagatctaaaggtccctggttcaatcccgggtttcggca

SEQ ID NO: 181 - DNA, 74 bp, synthetic construct
  misc_feature 1..74: note = Description of sequence: transcripted tRNA sequence; tRNA name: Ala_AGC_chr6:28763741-28763812 (-)
  source 1..74: mol_type = other DNA
gccgaaatagctcagttgggagagcgttagaccgaagatcttaaaggtccctggttcaatcccgggtttcggca

SEQ ID NO: 182 - DNA, 74 bp, synthetic construct
  misc_feature 1..74: note = Description of sequence: transcripted tRNA sequence; tRNA name: Ala_AGC_chr6:28763741-28763812 (-)
  source 1..74: mol_type = other DNA
gctgaaatagctcagttgggagagcgttagactgaagatcttaaagttccctggttcaaccctgggtttcagcc

SEQ ID NO: 183 - DNA, 72 bp, synthetic construct
  misc_feature 1..72: note = Description of sequence: transcripted tRNA sequence; tRNA name: Ala_AGC_chr6:28763741-28763812 (-)
  source 1..72: mol_type = other DNA
ggctcgttggtctaggggtatgattctcgcttaggatgcgagaggtcccgggttcaaatcccggacgagccc

SEQ ID NO: 184 - DNA, 72 bp, synthetic construct
  misc_feature 1..72: note = Description of sequence: transcripted tRNA sequence; tRNA name: Ala_AGC_chr6:28763741-28763812 (-)
  source 1..72: mol_type = other DNA
ggctcgttggtctaggggtatgattctcgcttagggtgcgagaggtcccgggttcaaatcccggacgagccc

SEQ ID NO: 185 - DNA, 72 bp, synthetic construct
  misc_feature 1..72: note = Description of sequence: transcripted tRNA sequence; tRNA name: Ala_AGC_chr6:28763741-28763812 (-)
  source 1..72: mol_type = other DNA
ggctcgttggtctaggggtatgattctcgcttcgggtgcgagaggtcccgggttcaaatcccggacgagccc

SEQ ID NO: 186 - DNA, 72 bp, synthetic construct
  misc_feature 1..72: note = Description of sequence: transcripted tRNA sequence; tRNA name: Ala_AGC_chr6:28763741-28763812 (-)
  source 1..72: mol_type = other DNA
ggctcgttggtctaggggtatgattctcgcttcgggtgtgagaggtcccgggttcaaatcccggacgagccc

SEQ ID NO: 187 - DNA, 72 bp, synthetic construct
  misc_feature 1..72: note = Description of sequence: transcripted tRNA sequence; tRNA name: Ala_AGC_chr6:28763741-28763812 (-)
  source 1..72: mol_type = other DNA
ggctcgttggtctagtggtatgattctcgctttgggtgcgagaggtcccgggttcaaatcccggacgagccc

SEQ ID NO: 188 - DNA, 72 bp, synthetic construct
  misc_feature 1..72: note = Description of sequence: transcripted tRNA sequence; tRNA name: Ala_AGC_chr6:28763741-28763812 (-)
  source 1..72: mol_type = other DNA
ggctcgttggtctaggggtatgattctcggtttgggtccgagaggtcccgggttcaaatcccggacgagccc

SEQ ID NO: 189 - DNA, 72 bp, synthetic construct
  misc_feature 1..72: note = Description of sequence: transcripted tRNA sequence; tRNA name: Ala_AGC_chr6:28763741-28763812 (-)
  source 1..72: mol_type = other DNA
ggctcgttggtctaggggtatgattctcgctttgggtgcgagaggtcccgggttcaaatcccggacgagccc

SEQ ID NO: 190 - DNA, 87 bp, synthetic construct
  misc_feature 1..87: note = Description of sequence: transcripted tRNA sequence; tRNA name: Ala_AGC_chr6:28763741-28763812 (-)
  source 1..87: mol_type = other DNA
gcccggatgatcctcagtggtctggggtgcaggcttcaaacctgtagctgtctagcgacagagtggttcaattccacctttcgggcg

SEQ ID NO: 191 - DNA, 84 bp, synthetic construct
  misc_feature 1..84: note = Description of sequence: transcripted tRNA sequence; tRNA name: Ala_AGC_chr6:28763741-28763812 (-)
  source 1..84: mol_type = other DNA
gctcggatgatcctcagtggtctggggtgcaggcttcaaacctgtagctgtctagtgacagagtggttcaattccacctttgta

SEQ ID NO: 192 - DNA, 82 bp, synthetic construct
  misc_feature 1..82: note = Description of sequence: transcripted tRNA sequence; tRNA name: Ala_AGC_chr6:28763741-28763812 (-)
  source 1..82: mol_type = other DNA
gtagtcgtggccgagtggttaaggcgatggactagaaatccattggggtttccccgcgcaggttcgaatcctgccgactacg

SEQ ID NO: 193 - DNA, 82 bp, synthetic construct
  misc_feature 1..82: note = Description of sequence: transcripted tRNA sequence; tRNA name: Ala_AGC_chr6:28763741-28763812 (-)
  source 1..82: mol_type = other DNA
gtagtcgtggccgagtggttaaggcgatggactagaaatccattggggtctccccgcgcaggttcgaatcctgccgactacg

SEQ ID NO: 194 - DNA, 82 bp, synthetic construct
  misc_feature 1..82: note = Description of sequence: transcripted tRNA sequence; tRNA name: Ala_AGC_chr6:28763741-28763812 (-)
  source 1..82: mol_type = other DNA
gtagtcgtggccgagtggttaaggcgatggactagaaatccattggggtttccccacgcaggttcgaatcctgccgactacg

SEQ ID NO: 195 - DNA, 82 bp, synthetic construct
  misc_feature 1..82: note = Description of sequence: transcripted tRNA sequence; tRNA name: Ala_AGC_chr6:28763741-28763812 (-)
  source 1..82: mol_type = other DNA
gtagtcgtggccgagtggttaaggtgatggactagaaacccattggggtctccccgcgcaggttcgaatcctgccgactacg

SEQ ID NO: 196 - DNA, 82 bp, synthetic construct
  misc_feature 1..82: note = Description of sequence: transcripted tRNA sequence; tRNA name: Ala_AGC_chr6:28763741-28763812 (-)
  source 1..82: mol_type = other DNA
gctgtgatggccgagtggttaaggcgttggactcgaaatccaatggggtctccccgcgcaggttcgaatcctgctcacagcg

SEQ ID NO: 197 - DNA, 82 bp, synthetic construct
  misc_feature 1..82: note = Description of sequence: transcripted tRNA sequence; tRNA name: Ala_AGC_chr6:28763741-28763812 (-)
  source 1..82: mol_type = other DNA
gctgtgatggccgagtggttaaggcgttggactcgaaatccaatggggtctccccgcgcaggttcaaatcctgctcacagcg

SEQ ID NO: 198 - DNA, 82 bp, synthetic construct
  misc_feature 1..82: note = Description of sequence: transcripted tRNA sequence; tRNA name: Ala_AGC_chr6:28763741-28763812 (-)
  source 1..82: mol_type = other DNA
gctgtgatggccgagtggttaaggtgttggactcgaaatccaatgggggttccccgcgcaggttcaaatcctgctcacagcg

SEQ ID NO: 199 - DNA, 82 bp, synthetic construct
  misc_feature 1..82: note = Description of sequence: transcripted tRNA sequence; tRNA name: Ala_AGC_chr6:28763741-28763812 (-)
  source 1..82: mol_type = other DNA
gtcacggtggccgagtggttaaggcgttggactcgaaatccaatggggtttccccgcacaggttcgaatcctgttcgtgacg

SEQ ID NO: 200 - DNA, 82 bp, synthetic construct
  misc_feature 1..82: note = Description of sequence: transcripted tRNA sequence; tRNA name: Ala_AGC_chr6:28763741-28763812 (-)
  source 1..82: mol_type = other DNA
gacgaggtggccgagtggttaaggcgatggactgctaatccattgtgctctgcacgcgtgggttcgaatcccaccctcgtcg

SEQ ID NO: 201 - DNA, 82 bp, synthetic construct
  misc_feature 1..82: note = Description of sequence: transcripted tRNA sequence; tRNA name: Ala_AGC_chr6:28763741-28763812 (-)
  source 1..82: mol_type = other DNA
gacgaggtggccgagtggttaaggcgatggactgctaatccattgtgctctgcacgcgtgggttcgaatcccaccttcgtcg

SEQ ID NO: 202 - DNA, 82 bp, synthetic construct
  misc_feature 1..82: note = Description of sequence: transcripted tRNA sequence; tRNA name: Ala_AGC_chr6:28763741-28763812 (-)
  source 1..82: mol_type = other DNA
gacgaggtggccgagtggttaaggcgatggactgctaatccattgtgctttgcacgcgtgggttcgaatcccatcctcgtcg

SEQ ID NO: 203 - DNA, 82 bp, synthetic construct
  misc_feature 1..82: note = Description of sequence: transcripted tRNA sequence; tRNA name: Ala_AGC_chr6:28763741-28763812 (-)
  source 1..82: mol_type = other DNA
gacgaggtggccgagtggttaaggcgatggactgctaatccattgtgctctgcacgcgtgggttcgaatcccatcctcgtcg

SEQ ID NO: 204 - DNA, 82 bp, synthetic construct
  misc_feature 1..82: note = Description of sequence: transcripted tRNA sequence; tRNA name: Ala_AGC_chr6:28763741-28763812 (-)
  source 1..82: mol_type = other DNA
gacgaggtggccgagtggttaaggcgatggactgctaatccattgtgctctgcacacgtgggttcgaatcccatcctcgtcg

SEQ ID NO: 205 - DNA, 84 bp, synthetic construct
  misc_feature 1..84: note = Description of sequence: transcripted tRNA sequence; tRNA name: Ala_AGC_chr6:28763741-28763812 (-)
  source 1..84: mol_type = other DNA
ggagaggcctggccgagtggttaaggcgatggactgctaatccattgtgctctgcacgcgtgggttcgaatcccatcctcgtcg

SEQ ID NO: 206 - DNA, 82 bp, synthetic construct
  misc_feature 1..82: note = Description of sequence: transcripted tRNA sequence; tRNA name: Ala_AGC_chr6:28763741-28763812 (-)
  source 1..82: mol_type = other DNA
gcagcgatggccgagtggttaaggcgttggacttgaaatccaatggggtctccccgcgcaggttcgaaccctgctcgctgcg

SEQ ID NO: 207 - DNA, 82 bp, synthetic construct
  misc_feature 1..82: note = Description of sequence: transcripted tRNA sequence; tRNA name: Ala_AGC_chr6:28763741-28763812 (-)
  source 1..82: mol_type = other DNA
gtagtcgtggccgagtggttaaggcgatggacttgaaatccattggggtttccccgcgcaggttcgaatcctgccgactacg

SEQ ID NO: 208 - DNA, 82 bp, synthetic construct
  misc_feature 1..82: note = Description of sequence: transcripted tRNA sequence; tRNA name: Ala_AGC_chr6:28763741-28763812 (-)
  source 1..82: mol_type = other DNA
gtagtcgtggccgagtggttaaggcgatggacttgaaatccattggggtctccccgcgcaggttcgaatcctgccgactacg

SEQ ID NO: 209 - DNA, 82 bp, synthetic construct
  misc_feature 1..82: note = Description of sequence: transcripted tRNA sequence; tRNA name: Ala_AGC_chr6:28763741-28763812 (-)
  source 1..82: mol_type = other DNA
gtagtcgtggccgagtggttaaggcgatggacttgaaatccattggggtttccccgcgcaggttcgaatcctgtcggctacg

SEQ ID NO: 210 - DNA, 74 bp, synthetic construct
  misc_feature 1..74: note = Description of sequence: transcripted tRNA sequence; tRNA name: Ala_AGC_chr6:28763741-28763812 (-)
  source 1..74: mol_type = other DNA
ggcgccgtggcttagttggttaaagcgcctgtctagtaaacaggagatcctgggttcgaatcccagcggtgcct

SEQ ID NO: 211 - DNA, 74 bp, synthetic construct
  misc_feature 1..74: note = Description of sequence: transcripted tRNA sequence; tRNA name: Ala_AGC_chr6:28763741-28763812 (-)
  source 1..74: mol_type = other DNA
ggctccgtggcttagctggttaaagcgcctgtctagtaaacaggagatcctgggttcgaatcccagcggggcct

SEQ ID NO: 212 - DNA, 74 bp, synthetic construct
  misc_feature 1..74: note = Description of sequence: transcripted tRNA sequence; tRNA name: Ala_AGC_chr6:28763741-28763812 (-)
  source 1..74: mol_type = other DNA
ggctccgtagcttagttggttaaagcgcctgtctagtaaacaggagatcctgggttcgactcccagcggggcct

SEQ ID NO: 213 - DNA, 74 bp, synthetic construct
  misc_feature 1..74: note = Description of sequence: transcripted tRNA sequence; tRNA name: Ala_AGC_chr6:28763741-28763812 (-)
  source 1..74: mol_type = other DNA
ggcttcgtggcttagctggttaaagcgcctgtctagtaaacaggagatcctgggttcgaatcccagcgaggcct

SEQ ID NO: 214 - DNA, 74 bp, synthetic construct
  misc_feature 1..74: note = Description of sequence: transcripted tRNA sequence; tRNA name: Ala_AGC_chr6:28763741-28763812 (-)
  source 1..74: mol_type = other DNA
ggcgccgtggcttagctggttaaagcgcctgtctagtaaacaggagatcctgggttcgaatcccagcggtgcct

SEQ ID NO: 215 - DNA, 74 bp, synthetic construct
  misc_feature 1..74: note = Description of sequence: transcripted tRNA sequence; tRNA name: Ala_AGC_chr6:28763741-28763812 (-)
  source 1..74: mol_type = other DNA
ggccctgtggcttagctggtcaaagcgcctgtctagtaaacaggagatcctgggttcgaatcccagcggggcct

SEQ ID NO: 216 - DNA, 74 bp, synthetic construct
  misc_feature 1..74: note = Description of sequence: transcripted tRNA sequence; tRNA name: Ala_AGC_chr6:28763741-28763812 (-)
  source 1..74: mol_type = other DNA
ggctctatggcttagttggttaaagcgcctgtctcgtaaacaggagatcctgggttcgactcccagtggggcct

SEQ ID NO: 217 - DNA, 72 bp, synthetic construct
  misc_feature 1..72: note = Description of sequence: transcripted tRNA sequence; tRNA name: Ala_AGC_chr6:28763741-28763812 (-)
  source 1..72: mol_type = other DNA
ggcgcggtggccaagtggtaaggcgtcggtctcgtaaaccgaagatcacgggttcgaaccccgtccgtgcct

SEQ ID NO: 218 - DNA, 74 bp, synthetic construct
  misc_feature 1..74: note = Description of sequence: transcripted tRNA sequence; tRNA name: Ala_AGC_chr6:28763741-28763812 (-)
  source 1..74: mol_type = other DNA
ggctctgtggcttagttggctaaagcgcctgtctcgtaaacaggagatcctgggttcgaatcccagcggggcct

SEQ ID NO: 219 - DNA, 72 bp, synthetic construct
  misc_feature 1..72: note = Description of sequence: transcripted tRNA sequence; tRNA name: Ala_AGC_chr6:28763741-28763812 (-)
  source 1..72: mol_type = other DNA
ggcgcggtggccaagtggtaaggcgtcggtctcgtaaaccgaagatcgcgggttcgaaccccgtccgtgcct

SEQ ID NO: 220 - DNA, 74 bp, synthetic construct
  misc_feature 1..74: note = Description of sequence: transcripted tRNA sequence; tRNA name: Ala_AGC_chr6:28763741-28763812 (-)
  source 1..74: mol_type = other DNA
ggccctgtagctcagcggttggagcgctggtctcgtaaacctaggggtcgtgagttcaaatctcaccagggcct

SEQ ID NO: 221 - DNA, 74 bp, synthetic construct
  misc_feature 1..74: note = Description of sequence: transcripted tRNA sequence; tRNA name: Ala_AGC_chr6:28763741-28763812 (-)
  source 1..74: mol_type = other DNA
ggctctatggcttagttggttaaagcgcctgtcttgtaaacaggagatcctgggttcgaatcccagtagagcct

SEQ ID NO: 222 - DNA, 73 bp, synthetic construct
  misc_feature 1..73: note = Description of sequence: transcripted tRNA sequence; tRNA name: Ala_AGC_chr6:28763741-28763812 (-)
  source 1..73: mol_type = other DNA
ggctccatagctcagtggttagagcactggtcttgtaaaccaggggtcgcgagttcgatcctcgctggggcct

SEQ ID NO: 223 - DNA, 73 bp, synthetic construct
  misc_feature 1..73: note = Description of sequence: transcripted tRNA sequence; tRNA name: Ala_AGC_chr6:28763741-28763812 (-)
  source 1..73: mol_type = other DNA
ggctccatagctcaggggttagagcgctggtcttgtaaaccaggggtcgcgagttcaattctcgctggggcct

SEQ ID NO: 224 - DNA, 73 bp, synthetic construct
  misc_feature 1..73: note = Description of sequence: transcripted tRNA sequence; tRNA name: Ala_AGC_chr6:28763741-28763812 (-)
  source 1..73: mol_type = other DNA
ggctccatagctcaggggttagagcactggtcttgtaaaccaggggtcgcgagttcaaatctcgctggggcct

SEQ ID NO: 225 - DNA, 73 bp, synthetic construct
  misc_feature 1..73: note = Description of sequence: transcripted tRNA sequence; tRNA name: Ala_AGC_chr6:28763741-28763812 (-)
  source 1..73: mol_type = other DNA
ggccctatagctcaggggttagagcactggtcttgtaaaccaggggtcgcgagttcaaatctcgctggggcct

SEQ ID NO: 226 - DNA, 72 bp, synthetic construct
  misc_feature 1..72: note = Description of sequence: transcripted tRNA sequence; tRNA name: Ala_AGC_chr6:28763741-28763812 (-)
  source 1..72: mol_type = other DNA
ggctccatagctcaggggttagagcactggtcttgtaaaccagggtcgcgagttcaaatctcgctggggcct

SEQ ID NO: 227 - DNA, 72 bp, synthetic construct
  misc_feature 1..72: note = Description of sequence: transcripted tRNA sequence; tRNA name: Ala_AGC_chr6:28763741-28763812 (-)
  source 1..72: mol_type = other DNA
ggcctcgtggcgcaacggtagcgcgtctgactccagatcagaaggttgcgtgttcaaatcacgtcggggtca

SEQ ID NO: 228 - DNA, 72 bp, synthetic construct
  misc_feature 1..72: note = Description of sequence: transcripted tRNA sequence; tRNA name: Ala_AGC_chr6:28763741-28763812 (-)
  source 1..72: mol_type = other DNA
gacctcgtggcgcaatggtagcgcgtctgactccagatcagaaggttgcgtgttcaagtcacgtcggggtca

SEQ ID NO: 229 - DNA, 72 bp, synthetic construct
  misc_feature 1..72: note = Description of sequence: transcripted tRNA sequence; tRNA name: Ala_AGC_chr6:28763741-28763812 (-)
  source 1..72: mol_type = other DNA
gacctcgtggcgcaacggtagcgcgtctgactccagatcagaaggttgcgtgttcaaatcacgtcggggtca

SEQ ID NO: 230 - DNA, 72 bp, synthetic construct
  misc_feature 1..72: note = Description of sequence: transcripted tRNA sequence; tRNA name: Ala_AGC_chr6:28763741-28763812 (-)
  source 1..72: mol_type = other DNA
gacctcgtggcgcaacggtagcgcgtctgactccagatcagaaggctgcgtgttcgaatcacgtcggggtca

SEQ ID NO: 231 - DNA, 72 bp, synthetic construct
  misc_feature 1..72: note = Description of sequence: transcripted tRNA sequence; tRNA name: Ala_AGC_chr6:28763741-28763812 (-)
  source 1..72: mol_type = other DNA
gacctcgtggcgcaacggcagcgcgtctgactccagatcagaaggttgcgtgttcaaatcacgtcggggtca

SEQ ID NO: 232 - DNA, 93 bp, synthetic construct
  misc_feature 1..93: note = Description of sequence: transcripted tRNA sequence; tRNA name: Ala_AGC_chr6:28763741-28763812 (-)
  source 1..93: mol_type = other DNA
ccttcaatagttcagctggtagagcagaggactatagctacttcctcagtaggagacgtccttaggttgctggttcgattccagcttgaagga

SEQ ID NO: 233 - DNA, 91 bp, synthetic construct
  misc_feature 1..91: note = Description of sequence: transcripted tRNA sequence; tRNA name: Ala_AGC_chr6:28763741-28763812 (-)
  source 1..91: mol_type = other DNA
ccttcgatagctcagttggtagagcggaggactgtagttggctgtgtccttagacatccttaggtcgctggttcgaatccggctcgaagga

SEQ ID NO: 234 - DNA, 89 bp, synthetic construct
  misc_feature 1..89: note = Description of sequence: transcripted tRNA sequence; tRNA name: Ala_AGC_chr6:28763741-28763812 (-)
  source 1..89: mol_type = other DNA
ccttcgatagctcagttggtagagcggaggactgtagtggatagggcgtggcaatccttaggtcgctggttcgattccggctcgaagga

SEQ ID NO: 235 - DNA, 89 bp, synthetic construct
  misc_feature 1..89: note = Description of sequence: transcripted tRNA sequence; tRNA name: Ala_AGC_chr6:28763741-28763812 (-)
  source 1..89: mol_type = other DNA
ccttcgatagctcagttggtagagcggaggactgtaggctcattaagcaaggtatccttaggtcgctggttcgaatccggctcggagga

SEQ ID NO: 236 - DNA, 94 bp, synthetic construct
  misc_feature 1..94: note = Description of sequence: transcripted tRNA sequence; tRNA name: Ala_AGC_chr6:28763741-28763812 (-)
  source 1..94: mol_type = other DNA
ccttcgatagctcagctggtagagcggaggactgtagattgtatagacatttgcggacatccttaggtcgctggttcgattccagctcgaagga

SEQ ID NO: 237 - DNA, 93 bp, synthetic construct
  misc_feature 1..93: note = Description of sequence: transcripted tRNA sequence; tRNA name: Ala_AGC_chr6:28763741-28763812 (-)
  source 1..93: mol_type = other DNA
ccttcgatagctcagctggtagagcggaggactgtagctacttcctcagcaggagacatccttaggtcgctggttcgattccggctcgaagga

SEQ ID NO: 238 - DNA, 89 bp, synthetic construct
  misc_feature 1..89: note = Description of sequence: transcripted tRNA sequence; tRNA name: Ala_AGC_chr6:28763741-28763812 (-)
  source 1..89: mol_type = other DNA
ccttcgatagctcagctggtagagcggaggactgtaggcgcgcgcccgtggccatccttaggtcgctggttcgattccggctcgaagga

SEQ ID NO: 239 - DNA, 94 bp, synthetic construct
  misc_feature 1..94: note = Description of sequence: transcripted tRNA sequence; tRNA name: Ala_AGC_chr6:28763741-28763812 (-)
  source 1..94: mol_type = other DNA
ccttcgatagctcagctggtagagcggaggactgtagcctgtagaaacatttgtggacatccttaggtcgctggttcgattccggctcgaagga

SEQ ID NO: 240 - DNA, 94 bp, synthetic construct
  misc_feature 1..94: note = Description of sequence: transcripted tRNA sequence; tRNA name: Ala_AGC_chr6:28763741-28763812 (-)
  source 1..94: mol_type = other DNA
ccttcgatagctcagctggtagagcggaggactgtagattgtacagacatttgcggacatccttaggtcgctggttcgattccggctcgaagga

SEQ ID NO: 241 - DNA, 89 bp, synthetic construct
  misc_feature 1..89: note = Description of sequence: transcripted tRNA sequence; tRNA name: Ala_AGC_chr6:28763741-28763812 (-)
  source 1..89: mol_type = other DNA
ccttcgatagctcagctggtagagcggaggactgtagtacttaatgtgtggtcatccttaggtcgctggttcgattccggctcgaagga

SEQ ID NO: 242 - DNA, 89 bp, synthetic construct
  misc_feature 1..89: note = Description of sequence: transcripted tRNA sequence; tRNA name: Ala_AGC_chr6:28763741-28763812 (-)
  source 1..89: mol_type = other DNA
ccttcgatagctcagctggtagagcggaggactgtaggggtttgaatgtggtcatccttaggtcgctggttcgaatccggctcggagga

SEQ ID NO: 243 - DNA, 94 bp, synthetic construct
  misc_feature 1..94: note = Description of sequence: transcripted tRNA sequence; tRNA name: Ala_AGC_chr6:28763741-28763812 (-)
  source 1..94: mol_type = other DNA
ccttcgatagctcagctggtagagcggaggactgtagactgcggaaacgtttgtggacatccttaggtcgctggttcaattccggctcgaagga

SEQ ID NO: 244 - DNA, 90 bp, synthetic construct
  misc_feature 1..90: note = Description of sequence: transcripted tRNA sequence; tRNA name: Ala_AGC_chr6:28763741-28763812 (-)
  source 1..90: mol_type = other DNA
ctttcgatagctcagttggtagagcggaggactgtaggttcattaaactaaggcatccttaggtcgctggttcgaatccggctcgaagga

SEQ ID NO: 245 - DNA, 88 bp, synthetic construct
  misc_feature 1..88: note = Description of sequence: transcripted tRNA sequence; tRNA name: Ala_AGC_chr6:28763741-28763812 (-)
  source 1..88: mol_type = other DNA
tcttcaatagctcagctggtagagcggaggactgtaggtgcacgcccgtggccattcttaggtgctggtttgattccgacttggagag

SEQ ID NO: 246 - DNA, 73 bp, synthetic construct
  misc_feature 1..73: note = Description of sequence: transcripted tRNA sequence; tRNA name: Ala_AGC_chr6:28763741-28763812 (-)
  source 1..73: mol_type = other DNA
gtttccgtagtgtagtggttatcacgttcgcctaacacgcgaaaggtccccggttcgaaaccgggcggaaaca

SEQ ID NO: 247 - DNA, 73 bp, synthetic construct
  misc_feature 1..73: note = Description of sequence: transcripted tRNA sequence; tRNA name: Ala_AGC_chr6:28763741-28763812 (-)
  source 1..73: mol_type = other DNA
gtttccgtagtgtagtggtcatcacgttcgcctaacacgcgaaaggtccccggttcgaaaccgggcggaaaca

SEQ ID NO: 248 - DNA, 73 bp, synthetic construct
  misc_feature 1..73: note = Description of sequence: transcripted tRNA sequence; tRNA name: Ala_AGC_chr6:28763741-28763812 (-)
  source 1..73: mol_type = other DNA
gtttccgtagtgtagtggttatcacgttcgcctaacacgcgaaaggtccctggatcaaaaccaggcggaaaca

SEQ ID NO: 249 - DNA, 73 bp, synthetic construct
  misc_feature 1..73: note = Description of sequence: transcripted tRNA sequence; tRNA name: Ala_AGC_chr6:28763741-28763812 (-)
  source 1..73: mol_type = other DNA
gtttccgtagtgtagtggttatcacgttcgcctaacacgcgaaaggtccgcggttcgaaaccgggcggaaaca

SEQ ID NO: 250 - DNA, 73 bp, synthetic construct
  misc_feature 1..73: note = Description of sequence: transcripted tRNA sequence; tRNA name: Ala_AGC_chr6:28763741-28763812 (-)
  source 1..73: mol_type = other DNA
gtttccgtagtgtagtggttatcacgtttgcctaacacgcgaaaggtccccggttcgaaaccgggcagaaaca

SEQ ID NO: 251 - DNA, 72 bp, synthetic construct
  misc_feature 1..72: note = Description of sequence: transcripted tRNA sequence; tRNA name: Ala_AGC_chr6:28763741-28763812 (-)
  source 1..72: mol_type = other DNA
gggggtgtagctcagtggtagagcgtatgcttaacattcatgaggctctgggttcgatccccagcacttcca

SEQ ID NO: 252 - DNA, 73 bp, synthetic construct
  misc_feature 1..73: note = Description of sequence: transcripted tRNA sequence; tRNA name: Ala_AGC_chr6:28763741-28763812 (-)
  source 1..73: mol_type = other DNA
gtttccgtagtgtagtggttatcacgttcgcctcacacgcgaaaggtccccggttcgaaaccgggcggaaaca

SEQ ID NO: 253 - DNA, 73 bp, synthetic construct
  misc_feature 1..73: note = Description of sequence: transcripted tRNA sequence; tRNA name: Ala_AGC_chr6:28763741-28763812 (-)
  source 1..73: mol_type = other DNA
gcttctgtagtgtagtggttatcacgttcgcctcacacgcgaaaggtccccggttcgaaaccgggcagaagca

SEQ ID NO: 254 - DNA, 73 bp, synthetic construct
  misc_feature 1..73: note = Description of sequence: transcripted tRNA sequence; tRNA name: Ala_AGC_chr6:28763741-28763812 (-)
  source 1..73: mol_type = other DNA
gtttccgtagtgtagcggttatcacattcgcctcacacgcgaaaggtccccggttcgatcccgggcggaaaca

SEQ ID NO: 255 - DNA, 73 bp, synthetic construct
  misc_feature 1..73: note = Description of sequence: transcripted tRNA sequence; tRNA name: Ala_AGC_chr6:28763741-28763812 (-)
  source 1..73: mol_type = other DNA
gtttccgtagtgtagtggttatcacgttcgcctcacacgcgaaaggtccccggttcgaaactgggcggaaaca

SEQ ID NO: 256 - DNA, 74 bp, synthetic construct
  misc_feature 1..74: note = Description of sequence: transcripted tRNA sequence; tRNA name: Ala_AGC_chr6:28763741-28763812 (-)
  source 1..74: mol_type = other DNA
gtttccgtagtgtagtggttatcacgttcgcctcacacgcgtaaaggtccccggttcgaaaccgggcggaaaca

SEQ ID NO: 257 - DNA, 73 bp, synthetic construct
  misc_feature 1..73: note = Description of sequence: transcripted tRNA sequence; tRNA name: Ala_AGC_chr6:28763741-28763812 (-)
  source 1..73: mol_type = other DNA
gtttccgtagtggagtggttatcacgttcgcctcacacgcgaaaggtccccggtttgaaaccaggcggaaaca

SEQ ID NO: 258 - DNA, 73 bp, synthetic construct
  misc_feature 1..73: note = Description of sequence: transcripted tRNA sequence; tRNA name: Ala_AGC_chr6:28763741-28763812 (-)
  source 1..73: mol_type = other DNA
ggttccatagtgtagtggttatcacgtctgctttacacgcagaaggtcctgggttcgagccccagtggaacca

SEQ ID NO: 259 - DNA, 73 bp, synthetic construct
  misc_feature 1..73: note = Description of sequence: transcripted tRNA sequence; tRNA name: Ala_AGC_chr6:28763741-28763812 (-)
  source 1..73: mol_type = other DNA
ggttccatagtgtagcggttatcacgtctgctttacacgcagaaggtcctgggttcgagccccagtggaacca

SEQ ID NO: 260 - DNA, 73 bp, synthetic construct
  misc_feature 1..73: note = Description of sequence: transcripted tRNA sequence; tRNA name: Ala_AGC_chr6:28763741-28763812 (-)
  source 1..73: mol_type = other DNA
ggttccatagtgtagtggttatcacatctgctttacacgcagaaggtcctgggttcaagccccagtggaacca

SEQ ID NO: 261 - DNA, 73 bp, synthetic construct
  misc_feature 1..73: note = Description of sequence: transcripted tRNA sequence; tRNA name: Ala_AGC_chr6:28763741-28763812 (-)
  source 1..73: mol_type = other DNA
gtttccgtggtgtagtggttatcacattcgccttacacgcgaaaggtcctcgggtcgaaaccgagcggaaaca

SEQ ID NO: 262 - DNA, 72 bp, synthetic construct
  misc_feature 1..72: note = Description of sequence: transcripted tRNA sequence; tRNA name: Ala_AGC_chr6:28763741-28763812 (-)
  source 1..72: mol_type = other DNA
agcagagtggcgcagcggaagcgtgctgggcccataacccagaggtcgatggatcgaaaccatcctctgcta

SEQ ID NO: 263 - DNA, 72 bp, synthetic construct
  misc_feature 1..72: note = Description of sequence: transcripted tRNA sequence; tRNA name: Ala_AGC_chr6:28763741-28763812 (-)
  source 1..72: mol_type = other DNA
agcagagtggcgcagcggaagcgtgctgggcccataacccagaggtcgatggatctaaaccatcctctgcta

SEQ ID NO: 264 - DNA, 73 bp, synthetic construct
  misc_feature 1..73: note = Description of sequence: transcripted tRNA sequence; tRNA name: Ala_AGC_chr6:28763741-28763812 (-)
  source 1..73: mol_type = other DNA
tccctggtggtctagtggctaggattcggcgctttcaccgccgcggcccgggttcgattcccggtcagggaat

SEQ ID NO: 265 - DNA, 72 bp, synthetic construct
  misc_feature 1..72: note = Description of sequence: transcripted tRNA sequence; tRNA name: Ala_AGC_chr6:28763741-28763812 (-)
  source 1..72: mol_type = other DNA
gcgttggtggtttagtggtagaattctcgcctcccatgcgggagacccgggttcaattcccggccactgcac

SEQ ID NO: 266 - DNA, 72 bp, synthetic construct
  misc_feature 1..72: note = Description of sequence: transcripted tRNA sequence; tRNA name: Ala_AGC_chr6:28763741-28763812 (-)
  source 1..72: mol_type = other DNA
ggccttggtggtgcagtggtagaattctcgcctcccacgtgggagacccgggttcaattcccggccaatgca

SEQ ID NO: 267 - DNA, 73 bp, synthetic construct
  misc_feature 1..73: note = Description of sequence: transcripted tRNA sequence; tRNA name: Ala_AGC_chr6:28763741-28763812 (-)
  source 1..73: mol_type = other DNA
gtccctggtggtctagtggctaggattcggcgctttcaccgccgcggcccgggttcgattcccggccagggaa

SEQ ID NO: 268 - DNA, 75 bp, synthetic construct
  misc_feature 1..75: note = Description of sequence: transcripted tRNA sequence; tRNA name: Ala_AGC_chr6:28763741-28763812 (-)
  source 1..75: mol_type = other DNA
tgtctctgtggcgcaatcggttagcgcgttcggctgttaaccgaaagattggtggttcgagcccacccagggacg

SEQ ID NO: 269 - DNA, 86 bp, synthetic construct
  misc_feature 1..86: note = Description of sequence: transcripted tRNA sequence; tRNA name: Ala_AGC_chr6:28763741-28763812 (-)
  source 1..86: mol_type = other DNA
tggctccgtggcgcaatggatagcgcattggacttctagaggctgaaggcattcaaaggttccgggttcgagtcccggcggagtcg

SEQ ID NO: 270 - DNA, 74 bp, synthetic construct
  misc_feature 1..74: note = Description of sequence: transcripted tRNA sequence; tRNA name: Ala_AGC_chr6:28763741-28763812 (-)
  source 1..74: mol_type = other DNA
gcccggctagctcagtcggtagagcatgagactcttaatctcagggtcgtgggttcgagccccacgttgggcgc

SEQ ID NO: 271 - DNA, 73 bp, synthetic construct
  misc_feature 1..73: note = Description of sequence: transcripted tRNA sequence; tRNA name: Ala_AGC_chr6:28763741-28763812 (-)
  source 1..73: mol_type = other DNA
gccgtgatcgtatagtggttagtactctgcgttgtggccgcagcaacctcggttcgaatccgagtcacggcag

SEQ ID NO: 272 - DNA, 73 bp, synthetic construct
  misc_feature 1..73: note = Description of sequence: transcripted tRNA sequence; tRNA name: Ala_AGC_chr6:28763741-28763812 (-)
  source 1..73: mol_type = other DNA
gcgttggtggtatagtggtgagcatagctgccttccaagcagttgacccgggttcgattcccggccaacgcag

SEQ ID NO: 273 - DNA, 73 bp, synthetic construct
  misc_feature 1..73: note = Description of sequence: transcripted tRNA sequence; tRNA name: Ala_AGC_chr6:28763741-28763812 (-)
  source 1..73: mol_type = other DNA
tccctggtggtctagtggttaggattcggcgctctcaccgccgcggcccgggttcgattcccggtcagggaaa

SEQ ID NO: 274 - DNA, 73 bp, synthetic construct
  misc_feature 1..73: note = Description of sequence: transcripted tRNA sequence; tRNA name: Ala_AGC_chr6:28763741-28763812 (-)
  source 1..73: mol_type = other DNA
aggttccatggtgtaatggtgagcactctggactctgaatccagcgatccgagttcgagtctcggtggaacct

SEQ ID NO: 275 - DNA, 75 bp, synthetic construct
  misc_feature 1..75: note = Description of sequence: transcripted tRNA sequence; tRNA name: Ala_AGC_chr6:28763741-28763812 (-)
  source 1..75: mol_type = other DNA
tgtctctgtggcgtagtcggttagcgcgttcggctgttaaccgaaaagttggtggttcgagcccacccaggaacg

SEQ ID NO: 276 - DNA, 75 bp, synthetic construct
  misc_feature 1..75: note = Description of sequence: transcripted tRNA sequence; tRNA name: Ala_AGC_chr6:28763741-28763812 (-)
  source 1..75: mol_type = other DNA
tgtctctgtggcgcaatcggttagcgcgttcggctgttaaccgaaaggttggtggttcgagcccacccagggacg

SEQ ID NO: 277 - DNA, 75 bp, synthetic construct
  misc_feature 1..75: note = Description of sequence: transcripted tRNA sequence; tRNA name: Ala_AGC_chr6:28763741-28763812 (-)
  source 1..75: mol_type = other DNA
gtctctgtggcgcaatcggttagcgcattcggctgttaaccgaaaggttggtggttcgagcccacccagggacgc

SEQ ID NO: 278 - DNA, 75 bp, synthetic construct
  misc_feature 1..75: note = Description of sequence: transcripted tRNA sequence; tRNA name: Ala_AGC_chr6:28763741-28763812 (-)
  source 1..75: mol_type = other DNA
gtctctgtggcgcaatgggttagcgcgttcggctgttaaccgaaaggttggtggttcgagcccatccagggacgc

SEQ ID NO: 279 - DNA, 72 bp, synthetic construct
  misc_feature 1..72: note = Description of sequence: transcripted tRNA sequence; tRNA name: Ala_AGC_chr6:28763741-28763812 (-)
  source 1..72: mol_type = other DNA
gcactggtggttcagtggtagaattctcgcctcacacgcgggacacccgggttcaattcccggtcaaggcaa

SEQ ID NO: 280 - DNA, 74 bp, synthetic construct
  misc_feature 1..74: note = Description of sequence: transcripted tRNA sequence; tRNA name: Ala_AGC_chr6:28763741-28763812 (-)
  source 1..74: mol_type = other DNA
gtttccgtagtgtagtggttatcacgttcgcctcacacgcgaaaggtccccggttcgaaactgggcggaaacag

SEQ ID NO: 281 - DNA, 72 bp, synthetic construct
  misc_feature 1..72: note = Description of sequence: transcripted tRNA sequence; tRNA name: Ala_AGC_chr6:28763741-28763812 (-)
  source 1..72: mol_type = other DNA
gcactggtggttcagtggtagaattctcgcctcccacgcgggagacccgggtttaattcccggtcaagataa

SEQ ID NO: 282 - DNA, 75 bp, synthetic construct
  misc_feature 1..75: note = Description of sequence: transcripted tRNA sequence; tRNA name: Ala_AGC_chr6:28763741-28763812 (-)
  source 1..75: mol_type = other DNA
gtttccgtagtgtagtggttatcacgttcgcctcacacgcgtaaaggtccccggttcgaaaccgggcggaaacat

SEQ ID NO: 283 - DNA, 73 bp, synthetic construct
  misc_feature 1..73: note = Description of sequence: transcripted tRNA sequence; tRNA name: Ala_AGC_chr6:28763741-28763812 (-)
  source 1..73: mol_type = other DNA
tagcagagtggcgcagcggaagcgtgctgggcccataacccagaggtcgatggatcgaaaccatcctctgcta

SEQ ID NO: 284 - DNA, 74 bp, synthetic construct
  misc_feature 1..74: note = Description of sequence: transcripted tRNA sequence; tRNA name: Ala_AGC_chr6:28763741-28763812 (-)
  source 1..74: mol_type = other DNA
gtttccgtagtgtagtggttatcacgttcgcctcacacgcgaaaggtccccggttcgaaaccgggcggaaacaa

SEQ ID NO: 285 - DNA, 73 bp, synthetic construct
  misc_feature 1..73: note = Description of sequence: transcripted tRNA sequence; tRNA name: Ala_AGC_chr6:28763741-28763812 (-)
  source 1..73: mol_type = other DNA
tcctcgttagtatagtggtgagtatccccgcctgtcacgcgggagaccggggttcgattccccgacggggagg

SEQ ID NO: 286 - DNA, 72 bp, synthetic construct
  misc_feature 1..72: note = Description of sequence: transcripted tRNA sequence; tRNA name: Ala_AGC_chr6:28763741-28763812 (-)
  source 1..72: mol_type = other DNA
tgcatgggtggttcagtggtagaattctcgcctgccacgcgggaggcccgggttcgattcccggcccatgca

SEQ ID NO: 287 - DNA, 73 bp, synthetic construct
  misc_feature 1..73: note = Description of sequence: transcripted tRNA sequence; tRNA name: Ala_AGC_chr6:28763741-28763812 (-)
  source 1..73: mol_type = other DNA
tccctggtggtctagtggttaggattcggcgctctcaccgccgcggcccgggttcgattcccggtcagggaag

SEQ ID NO: 288 - DNA, 73 bp, synthetic construct
  misc_feature 1..73: note = Description of sequence: transcripted tRNA sequence; tRNA name: Ala_AGC_chr6:28763741-28763812 (-)
  source 1..73: mol_type = other DNA
atccttgttactatagtggtgagtatctctgcctgtcatgcgtgagagagggggtcgattccccgacggggag

SEQ ID NO: 289 - DNA, 72 bp, synthetic construct
  misc_feature 1..72: note = Description of sequence: transcripted tRNA sequence; tRNA name: Ala_AGC_chr6:28763741-28763812 (-)
  source 1..72: mol_type = other DNA
gcattggtggttcagtggtagaattctcgcctgccacgcgggaggcccgggttcgattcccggccaatgcac

SEQ ID NO: 290 - DNA, 84 bp, synthetic construct
  misc_feature 1..84: note = Description of sequence: transcripted tRNA sequence; tRNA name: Ala_AGC_chr6:28763741-28763812 (-)
  source 1..84: mol_type = other DNA
gtcaggatggccgagcggtctaaggcgctgcgttcaggtcgcagtctcccctggaggcgtgggttcgaatcccactcctgacaa

SEQ ID NO: 291 - DNA, 73 bp, synthetic construct
  misc_feature 1..73: note = Description of sequence: transcripted tRNA sequence; tRNA name: Ala_AGC_chr6:28763741-28763812 (-)
  source 1..73: mol_type = other DNA
cgcgttggtggtatagtggtgagcatagctgccttccaagcagttgacccgggttcgattcccggccaacgca

SEQ ID NO: 292 - DNA, 75 bp, synthetic construct
  misc_feature 1..75: note = Description of sequence: transcripted tRNA sequence; tRNA name: Ala_AGC_chr6:28763741-28763812 (-)
  source 1..75: mol_type = other DNA
cgtctctgtggcgcaatcggttagcgcgttcggctgttaaccgaaaggttggtggttcgatcccacccagggacg

SEQ ID NO: 293 - DNA, 73 bp, synthetic construct
  misc_feature 1..73: note = Description of sequence: transcripted tRNA sequence; tRNA name: Ala_AGC_chr6:28763741-28763812 (-)
  source 1..73: mol_type = other DNA
cgcgttggtggtgtagtggtgagcacagctgcctttcaagcagttaacgcgggttcgattcccgggtaacgaa

SEQ ID NO: 294 - DNA, 73 bp, synthetic construct
  misc_feature 1..73: note = Description of sequence: transcripted tRNA sequence; tRNA name: Ala_AGC_chr6:28763741-28763812 (-)
  source 1..73: mol_type = other DNA
cggctcgttggtctaggggtatgattctcgcttcgggtgcgagaggtcccgggttcaaatcccggacgagccc

SEQ ID NO: 295 - DNA, 73 bp, synthetic construct
  misc_feature 1..73: note = Description of sequence: transcripted tRNA sequence; tRNA name: Ala_AGC_chr6:28763741-28763812 (-)
  source 1..73: mol_type = other DNA
ggctcgttggtctaggggtatgattctcgcttagggtgcgagaggtcccgggttcaaatcccggacgagccct

SEQ ID NO: 296 - DNA, 74 bp, synthetic construct
  misc_feature 1..74: note = Description of sequence: transcripted tRNA sequence; tRNA name: Ala_AGC_chr6:28763741-28763812 (-)
  source 1..74: mol_type = other DNA
cgcccggatagctcagtcggtagagcatcagacttttaatctgagggtccagggttcaagtccctgttcgggcg

SEQ ID NO: 297 - DNA, 74 bp, synthetic construct
  misc_feature 1..74: note = Description of sequence: transcripted tRNA sequence; tRNA name: Ala_AGC_chr6:28763741-28763812 (-)
  source 1..74: mol_type = other DNA
gcccggatagctcagtcggtagagcatcagacttttaatctgagggtccagggttcaagtccctgttcgggcgt

SEQ ID NO: 298 - DNA, 107 bp, synthetic construct
  misc_feature 1..107: note = Description of sequence: transcripted tRNA sequence; tRNA name: Ala_AGC_chr6:28763741-28763812 (-)
  source 1..107: mol_type = other DNA
tgtcaggatggccgagtggtctaaggcgccagactcaaggtaagcaccttgcctgcgggctttctggtctccggatggaggcgtgggttcgaatcccacttctgaca

SEQ ID NO: 299 - DNA, 73 bp, synthetic construct
  misc_feature 1..73: note = Description of sequence: transcripted tRNA sequence; tRNA name: Ala_AGC_chr6:28763741-28763812 (-)
  source 1..73: mol_type = other DNA
ttccctggtggtctagtggttaggattcggcgctctcaccgccgcggcccgggttcgattcccggtcaggaaa

SEQ ID NO: 300 - DNA, 90 bp, synthetic construct
  misc_feature 1..90: note = Description of sequence: transcripted tRNA sequence; tRNA name: Ala_AGC_chr6:28763741-28763812 (-)
  source 1..90: mol_type = other DNA
gccttcgatagctcagttggtagagcggaggactgtagtggatagggcgtggcaatccttaggtcgctggttcgattccggctcgaagga

SEQ ID NO: 301 - DNA, 74 bp, synthetic construct
  misc_feature 1..74: note = Description of sequence: transcripted tRNA sequence; tRNA name: Ala_AGC_chr6:28763741-28763812 (-)
  source 1..74: mol_type = other DNA
cgggggattagctcaaatggtagagcgctcgcttagcatgcgagaggtagcgggatcgatgcccgcatcctcca

SEQ ID NO: 302 - DNA, 94 bp, synthetic construct
  misc_feature 1..94: note = Description of sequence: transcripted tRNA sequence; tRNA name: Ala_AGC_chr6:28763741-28763812 (-)
  source 1..94: mol_type = other DNA
agctccagtggcgcaatcggttagcgcgcggtacttatacagcagtacatgcagagcaatgccgaggttgtgagttcgagcctcacctggagca

SEQ ID NO: 303 - DNA, 72 bp, synthetic construct
  misc_feature 1..72: note = Description of sequence: transcripted tRNA sequence; tRNA name: Ala_AGC_chr6:28763741-28763812 (-)
  source 1..72: mol_type = other DNA
gcgccgctggtgtagtggtatcatgcaagattcccattcttgcgacccgggttcgattcccgggcggcgcat

SEQ ID NO: 304 - DNA, 73 bp, synthetic construct
  misc_feature 1..73: note = Description of sequence: transcripted tRNA sequence; tRNA name: Ala_AGC_chr6:28763741-28763812 (-)
  source 1..73: mol_type = other DNA
tcccatatggtctagcggttaggattcctggttttcacccaggtggcccgggttcgactcccggtatgggaac

SEQ ID NO: 305 - DNA, 73 bp, synthetic construct
  misc_feature 1..73: note = Description of sequence: transcripted tRNA sequence; tRNA name: Ala_AGC_chr6:28763741-28763812 (-)
  source 1..73: mol_type = other DNA
gggggatgtagctcagtggtagagcgcgcgcttcgcatgtgtgaggtcccgggttcaatccccggcatctcca

SEQ ID NO: 306 - DNA, 72 bp, synthetic construct
  misc_feature 1..72: note = Description of sequence: transcripted tRNA sequence; tRNA name: Ala_AGC_chr6:28763741-28763812 (-)
  source 1..72: mol_type = other DNA
gcattggtggttcagtggtagaattctcgcctgccacgcgggaggcccgggttcgattcccggccaatgcaa

SEQ ID NO: 307 - DNA, 74 bp, synthetic construct
  misc_feature 1..74: note = Description of sequence: transcripted tRNA sequence; tRNA name: Ala_AGC_chr6:28763741-28763812 (-)
  source 1..74: mol_type = other DNA
gggccagtggcgcaatggataacgcgtctgactacggatcagaagattctaggttcgactcctggctggctcgc

SEQ ID NO: 308 - DNA, 74 bp, synthetic construct
  misc_feature 1..74: note = Description of sequence: transcripted tRNA sequence; tRNA name: Ala_AGC_chr6:28763741-28763812 (-)
  source 1..74: mol_type = other DNA
ggtttccgtagtgtagtggttatcacgttcgcctaacacgcgaaaggtccccggttcgaaaccgggcggaaaca

SEQ ID NO: 309 - DNA, 74 bp, synthetic construct
  misc_feature 1..74: note = Description of sequence: transcripted tRNA sequence; tRNA name: Ala_AGC_chr6:28763741-28763812 (-)
  source 1..74: mol_type = other DNA
agtttccgtagtgtagtggttatcacgttcgcctaacacgcgaaaggtccccggttcgaaaccgggcggaaaca

SEQ ID NO: 310 - DNA, 83 bp, synthetic construct
  misc_feature 1..83: note = Description of sequence: transcripted tRNA sequence; tRNA name: Ala_AGC_chr6:28763741-28763812 (-)
  source 1..83: mol_type = other DNA
aggtagcgtggccgagcggtctaaggcgctggattaaggctccagtctcttcgggggcgtgggttcgaatcccaccgctgcca

SEQ ID NO: 311 - DNA, 74 bp, synthetic construct
  misc_feature 1..74: note = Description of sequence: transcripted tRNA sequence; tRNA name: Ala_AGC_chr6:28763741-28763812 (-)
  source 1..74: mol_type = other DNA
gtttccgtagtgtagtggtcatcacgttcgcctaacacgcgaaaggtccccggttcgaaaccgggcggaaacat

SEQ ID NO: 312 - DNA, 73 bp, synthetic construct
  misc_feature 1..73: note = Description of sequence: transcripted tRNA sequence; tRNA name: Ala_AGC_chr6:28763741-28763812 (-)
  source 1..73: mol_type = other DNA
ggctcgttggtctaggggtatgattctcgctttgggtgcgagaggtcccgggttcaaatcccggacgagccca

SEQ ID NO: 313 - DNA, 73 bp, synthetic construct
  misc_feature 1..73: note = Description of sequence: transcripted tRNA sequence; tRNA name: Ala_AGC_chr6:28763741-28763812 (-)
  source 1..73: mol_type = other DNA
ggctccatagctcaggggttagagcactggtcttgtaaaccagggtcgcgagttcaaatctcgctggggcctg

SEQ ID NO: 314 - DNA, 73 bp, synthetic construct
  misc_feature 1..73: note = Description of sequence: transcripted tRNA sequence; tRNA name: Ala_AGC_chr6:28763741-28763812 (-)
  source 1..73: mol_type = other DNA
tggggatgtagctcagtggtagagcgcatgctttgcatgtatgaggccccgggttcgatccccggcatctcca

SEQ ID NO: 315 - DNA, 74 bp, synthetic construct
  misc_feature 1..74: note = Description of sequence: transcripted tRNA sequence; tRNA name: Ala_AGC_chr6:28763741-28763812 (-)
  source 1..74: mol_type = other DNA
cgcccggctagctcagtcggtagagcatgagactcttaatctcagggtcgtgggttcgagccccacgttgggcg

SEQ ID NO: 316 - DNA, 74 bp, synthetic construct
  misc_feature 1..74: note = Description of sequence: transcripted tRNA sequence; tRNA name: Ala_AGC_chr6:28763741-28763812 (-)
  source 1..74: mol_type = other DNA
gtttccgtagtgtagtggttatcacgttcgcctaacacgcgaaaggtccccggttcgaaaccgggcggaaacaa

SEQ ID NO: 317 - DNA, 74 bp, synthetic construct
  misc_feature 1..74: note = Description of sequence: transcripted tRNA sequence; tRNA name: Ala_AGC_chr6:28763741-28763812 (-)
  source 1..74: mol_type = other DNA
gcccggctagctcagtcggtagagcatgagactcttaatctcagggtcgtgggttcgagccccacgttgggcgt

SEQ ID NO: 318 - DNA, 74 bp, synthetic construct
  misc_feature 1..74: note = Description of sequence: transcripted tRNA sequence; tRNA name: Ala_AGC_chr6:28763741-28763812 (-)
  source 1..74: mol_type = other DNA
gtttccgtagtgtagtggttatcacgttcgcctcacacgcgaaaggtccccggttcgaaaccgggcggaaacac

SEQ ID NO: 319 - DNA, 73 bp, synthetic construct
  misc_feature 1..73: note = Description of sequence: transcripted tRNA sequence; tRNA name: Ala_AGC_chr6:28763741-28763812 (-)
  source 1..73: mol_type = other DNA
cagcagagtggcgcagcggaagcgtgctgggcccataacccagaggtcgatggatcgaaaccatcctctgcta

SEQ ID NO: 320 - DNA, 85 bp, synthetic construct
  misc_feature 1..85: note = Description of sequence: transcripted tRNA sequence; tRNA name: Ala_AGC_chr6:28763741-28763812 (-)
  source 1..85: mol_type = other DNA
ggagaggcctggccgagtggttaaggcgatggactgctaatccattgtgctctgcacgcgtgggttcgaatcccatcctcgtcgc

SEQ ID NO: 321 - DNA, 73 bp, synthetic construct
  misc_feature 1..73: note = Description of sequence: transcripted tRNA sequence; tRNA name: Ala_AGC_chr6:28763741-28763812 (-)
  source 1..73: mol_type = other DNA
ggccccatggtgtaatggttagcactctggactttgaatccagcgatccgagttcaaatctcggtgggacctg

SEQ ID NO: 322 - DNA, 73 bp, synthetic construct
  misc_feature 1..73: note = Description of sequence: transcripted tRNA sequence; tRNA name: Ala_AGC_chr6:28763741-28763812 (-)
  source 1..73: mol_type = other DNA
ggccccatggtgtaatggttagcactctggactttgaatccagcgatccgagttcaaatctcggtgggaccta

SEQ ID NO: 323 - DNA, 83 bp, synthetic construct
  misc_feature 1..83: note = Description of sequence: transcripted tRNA sequence; tRNA name: Ala_AGC_chr6:28763741-28763812 (-)
  source 1..83: mol_type = other DNA
gtagtcgtggccgagtggttaaggcgatggacttgaaatccattggggtctccccgcgcaggttcgaatcctgccgactacgg

SEQ ID NO: 324 - DNA, 73 bp, synthetic construct
  misc_feature 1..73: note = Description of sequence: transcripted tRNA sequence; tRNA name: Ala_AGC_chr6:28763741-28763812 (-)
  source 1..73: mol_type = other DNA
agcagagtggcgcagcggaagcgtgctgggcccataacccagaggtcgatggatcgaaaccatcctctgctat

SEQ ID NO: 325 - DNA, 74 bp, synthetic construct
  misc_feature 1..74: note = Description of sequence: transcripted tRNA sequence; tRNA name: Ala_AGC_chr6:28763741-28763812 (-)
  source 1..74: mol_type = other DNA
ggaccacgtggcctaatggataaggcgtctgacttcggatcagaagattgagggttcgaatccctccgtggtta

SEQ ID NO: 326 - DNA, 83 bp, synthetic construct
  misc_feature 1..83: note = Description of sequence: transcripted tRNA sequence; tRNA name: Ala_AGC_chr6:28763741-28763812 (-)
  source 1..83: mol_type = other DNA
tgtagtcgtggccgagtggttaaggcgatggactagaaatccattggggtctccccgcgcaggttcgaatcctgccgactacg

SEQ ID NO: 327 - DNA, 73 bp, synthetic construct
  misc_feature 1..73: note = Description of sequence: transcripted tRNA sequence; tRNA name: Ala_AGC_chr6:28763741-28763812 (-)
  source 1..73: mol_type = other DNA
agcagagtggcgcagcggaagcgtgctgggcccataacccagaggtcgatggatcgaaaccatcctctgctag

SEQ ID NO: 328 - DNA, 84 bp, synthetic construct
  misc_feature 1..84: note = Description of sequence: transcripted tRNA sequence; tRNA name: Ala_AGC_chr6:28763741-28763812 (-)
  source 1..84: mol_type = other DNA
cgtcaggatggccgagcggtctaaggcgctgcgttcaggtcgcagtctcccctggaggcgtgggttcgaatcccactcctgaca

SEQ ID NO: 329 - DNA, 75 bp, synthetic construct
  misc_feature 1..75: note = Description of sequence: transcripted tRNA sequence; tRNA name: Ala_AGC_chr6:28763741-28763812 (-)
  source 1..75: mol_type = other DNA
ggctccgtggcttagctggttaaagcgcctgtctagtaaacaggagatcctgggttcgaatcccagcggggcctg

SEQ ID NO: 330 - DNA, 74 bp, synthetic construct
  misc_feature 1..74: note = Description of sequence: transcripted tRNA sequence; tRNA name: Ala_AGC_chr6:28763741-28763812 (-)
  source 1..74: mol_type = other DNA
agggccagtggcgcaatggataacgcgtctgactacggatcagaagattccaggttcgactcctggctggctcg

SEQ ID NO: 331 - DNA, 74 bp, synthetic construct
  misc_feature 1..74: note = Description of sequence: transcripted tRNA sequence; tRNA name: Ala_AGC_chr6:28763741-28763812 (-)
  source 1..74: mol_type = other DNA
ggtttccgtagtgtagtggttatcacgttcgcctcacacgcgaaaggtccccggttcgaaaccgggcggaaaca

SEQ ID NO: 332 - DNA, 73 bp, synthetic construct
  misc_feature 1..73: note = Description of sequence: transcripted tRNA sequence; tRNA name: Ala_AGC_chr6:28763741-28763812 (-)
  source 1..73: mol_type = other DNA
aggggatgtagctcagtggtagagcgcatgcttcgcatgtatgaggtcccgggttcgatccccggcatctcca

SEQ ID NO: 333 - DNA, 75 bp, synthetic construct
  misc_feature 1..75: note = Description of sequence: transcripted tRNA sequence; tRNA name: Ala_AGC_chr6:28763741-28763812 (-)
  source 1..75: mol_type = other DNA
tggccggttagctcagttggttagagcgtggtgctaataacgccaaggtcgcgggttcgatccccgtacgggcca

SEQ ID NO: 334 - DNA, 73 bp, synthetic construct
  misc_feature 1..73: note = Description of sequence: transcripted tRNA sequence; tRNA name: Ala_AGC_chr6:28763741-28763812 (-)
  source 1..73: mol_type = other DNA
cggctcgttggtctaggggtatgattctcgcttagggtgcgagaggtcccgggttcaaatcccggacgagccc

SEQ ID NO: 335 - DNA, 74 bp, synthetic construct
  misc_feature 1..74: note = Description of sequence: transcripted tRNA sequence; tRNA name: Ala_AGC_chr6:28763741-28763812 (-)
  source 1..74: mol_type = other DNA
agcccggctagctcagtcggtagagcatgagactcttaatctcagggtcgtgggttcgagccccacgttgggcg

SEQ ID NO: 336 - DNA, 92 bp, synthetic construct
  misc_feature 1..92: note = Description of sequence: transcripted tRNA sequence; tRNA name: Ala_AGC_chr6:28763741-28763812 (-)
  source 1..92: mol_type = other DNA
tccttcgatagctcagttggtagagcggaggactgtagttggctgtgtccttagacatccttaggtcgctggttcgaatccggctcgaagga

SEQ ID NO: 337 - DNA, 74 bp, synthetic construct
  misc_feature 1..74: note = Description of sequence: transcripted tRNA sequence; tRNA name: Ala_AGC_chr6:28763741-28763812 (-)
  source 1..74: mol_type = other DNA
ggggaattagctcaaatggtagagcgctcgcttagcatgcgagaggtagcgggatcgatgcccgcattctccag

SEQ ID NO: 338 - DNA, 74 bp, synthetic construct
  misc_feature 1..74: note = Description of sequence: transcripted tRNA sequence; tRNA name: Ala_AGC_chr6:28763741-28763812 (-)
  source 1..74: mol_type = other DNA
cgccctcttagcgcagcgggcagcgcgtcagtctcataatctgaaggtcctgagttcgagcctcagagagggca

SEQ ID NO: 339 - DNA, 95 bp, synthetic construct
  misc_feature 1..95: note = Description of sequence: transcripted tRNA sequence; tRNA name: Ala_AGC_chr6:28763741-28763812 (-)
  source 1..95: mol_type = other DNA
tgctccagtggcgcaatcggttagcgcgcggtacttatatggcagtatgtgtgcgagtgatgccgaggttgtgagttcgagcctcacctggagca

SEQ ID NO: 340 - DNA, 73 bp, synthetic construct
  misc_feature 1..73: note = Description of sequence: transcripted tRNA sequence; tRNA name: Ala_AGC_chr6:28763741-28763812 (-)
  source 1..73: mol_type = other DNA
tgccgtgatcgtatagtggttagtactctgcgttgtggccgcagcaacctcggttcgaatccgagtcacggca

SEQ ID NO: 341 - DNA, 75 bp, synthetic construct
  misc_feature 1..75: note = Description of sequence: transcripted tRNA sequence; tRNA name: Ala_AGC_chr6:28763741-28763812 (-)
  source 1..75: mol_type = other DNA
ggccggttagctcagttggttagagcgtggtgctaataacgccaaggtcgcgggttcgatccccgtacgggccac

SEQ ID NO: 342 - DNA, 74 bp, synthetic construct
  misc_feature 1..74: note = Description of sequence: transcripted tRNA sequence; tRNA name: Ala_AGC_chr6:28763741-28763812 (-)
  source 1..74: mol_type = other DNA
agtttccgtagtgtagtggttatcacgtttgcctaacacgcgaaaggtccccggttcgaaaccgggcagaaaca

SEQ ID NO: 343 - DNA, 74 bp, synthetic construct
  misc_feature 1..74: note = Description of sequence: transcripted tRNA sequence; tRNA name: Ala_AGC_chr6:28763741-28763812 (-)
  source 1..74: mol_type = other DNA
gcttctgtagtgtagtggttatcacgttcgcctcacacgcgaaaggtccccggttcgaaaccgggcagaagcaa

SEQ ID NO: 344 - DNA, 73 bp, synthetic construct
  misc_feature 1..73: note = Description of sequence: transcripted tRNA sequence; tRNA name: Ala_AGC_chr6:28763741-28763812 (-)
  source 1..73: mol_type = other DNA
ttcctcgttagtatagtggtgagtatccccgcctgtcacgcgggagaccggggttcgattccccgacggggag

SEQ ID NO: 345 - DNA, 83 bp, synthetic construct
  misc_feature 1..83: note = Description of sequence: transcripted tRNA sequence; tRNA name: Ala_AGC_chr6:28763741-28763812 (-)
  source 1..83: mol_type = other DNA
gtagtcgtggccgagtggttaaggcgatggacttgaaatccattggggtttccccgcgcaggttcgaatcctgtcggctacgg

SEQ ID NO: 346 - DNA, 73 bp, synthetic construct
  misc_feature 1..73: note = Description of sequence: transcripted tRNA sequence; tRNA name: Ala_AGC_chr6:28763741-28763812 (-)
  source 1..73: mol_type = other DNA
aggttccatggtgtaatggttagcactctggactctgaatccagcgatccgagttcaaatctcggtggaacct

SEQ ID NO: 347 - DNA, 73 bp, synthetic construct
  misc_feature 1..73: note = Description of sequence: transcripted tRNA sequence; tRNA name: Ala_AGC_chr6:28763741-28763812 (-)
  source 1..73: mol_type = other DNA
tcctcgttagtatagtggtgagtgtccccgtctgtcacgcgggagaccggggttcgattccccgacggggaga

SEQ ID NO: 348 - DNA, 74 bp, synthetic construct
  misc_feature 1..74: note = Description of sequence: transcripted tRNA sequence; tRNA name: Ala_AGC_chr6:28763741-28763812 (-)
  source 1..74: mol_type = other DNA
gtttccgtagtgtagtggttatcacgttcgcctaacacgcgaaaggtccctggatcaaaaccaggcggaaacaa

SEQ ID NO: 349 - DNA, 75 bp, synthetic construct
  misc_feature 1..75: note = Description of sequence: transcripted tRNA sequence; tRNA name: Ala_AGC_chr6:28763741-28763812 (-)
  source 1..75: mol_type = other DNA
cggccggttagctcagttggttagagcgtggtgctaataacgccaaggtcgcgggttcgatccccgtactggcca

SEQ ID NO: 350 - DNA, 73 bp, synthetic construct
  misc_feature 1..73: note = Description of sequence: transcripted tRNA sequence; tRNA name: Ala_AGC_chr6:28763741-28763812 (-)
  source 1..73: mol_type = other DNA
ggccccatggtgtaatggtcagcactctggactctgaatccagcgatccgagttcaaatctcggtgggaccca

SEQ ID NO: 351 - DNA, 73 bp, synthetic construct
  misc_feature 1..73: note = Description of sequence: transcripted tRNA sequence; tRNA name: Ala_AGC_chr6:28763741-28763812 (-)
  source 1..73: mol_type = other DNA
ggccccatggtgtaatggttagcactctggactttgaatccagcgatccgagttcaaatctcggtgggacctt

SEQ ID NO: 352 - DNA, 73 bp, synthetic construct
  misc_feature 1..73: note = Description of sequence: transcripted tRNA sequence; tRNA name: Ala_AGC_chr6:28763741-28763812 (-)
  source 1..73: mol_type = other DNA
tgggggtgtagctcagtggtagagcgcgtgcttagcatgtacgaggtcccgggttcaatccccggcacctcca

SEQ ID NO: 353 - DNA, 73 bp, synthetic construct
  misc_feature 1..73: note = Description of sequence: transcripted tRNA sequence; tRNA name: Ala_AGC_chr6:28763741-28763812 (-)
  source 1..73: mol_type = other DNA
ggggatgtagctcagtggtagagcgcatgcttagcatgcatgaggtcccgggttcgatccccagcatctccag

SEQ ID NO: 354 - DNA, 73 bp, synthetic construct
  misc_feature 1..73: note = Description of sequence: transcripted tRNA sequence; tRNA name: Ala_AGC_chr6:28763741-28763812 (-)
  source 1..73: mol_type = other DNA
agggggtgtagctcagtggtagagcgcgtgcttcgcatgtacgaggccccgggttcgacccccggctcctcca

SEQ ID NO: 355 - DNA, 73 bp, synthetic construct
  misc_feature 1..73: note = Description of sequence: transcripted tRNA sequence; tRNA name: Ala_AGC_chr6:28763741-28763812 (-)
  source 1..73: mol_type = other DNA
gggggtgtagctcagtggtagagcgcgtgcttagcatgcacgaggccccgggttcaatccccggcacctccat

SEQ ID NO: 356 - DNA, 73 bp, synthetic construct
  misc_feature 1..73: note = Description of sequence: transcripted tRNA sequence; tRNA name: Ala_AGC_chr6:28763741-28763812 (-)
  source 1..73: mol_type = other DNA
gggggtgtagctcagtggtagagcgcgtgcttagcatgcacgaggccccgggttcaatccccggcacctccag

SEQ ID NO: 357 - DNA, 107 bp, synthetic construct
  misc_feature 1..107: note = Description of sequence: transcripted tRNA sequence; tRNA name: Ala_AGC_chr6:28763741-28763812 (-)
  source 1..107: mol_type = other DNA
gtcaggatggccgagtggtctaaggcgccagactcaagctaagcttcctccgcggtggggattctggtctccaatggaggcgtgggttcgaatcccacttctgacac

SEQ ID NO: 358 - DNA, 106 bp, synthetic construct
  misc_feature 1..106: note = Description of sequence: transcripted tRNA sequence; tRNA name: Ala_AGC_chr6:28763741-28763812 (-)
  source 1..106: mol_type = other DNA
tgtcaggatggccgagtggtctaaggcgccagactcaagcttggcttcctcgtgttgaggattctggtctccaatggaggcgtgggttcgaatcccacttctgaca

SEQ ID NO: 359 - DNA, 73 bp, synthetic construct
  misc_feature 1..73: note = Description of sequence: transcripted tRNA sequence; tRNA name: Ala_AGC_chr6:28763741-28763812 (-)
  source 1..73: mol_type = other DNA
ggttccatggtgtaatggttagcactctggactctgaatccagcgatccgagttcaaatctcggtggaacctt

SEQ ID NO: 360 - DNA, 83 bp, synthetic construct
  misc_feature 1..83: note = Description of sequence: transcripted tRNA sequence; tRNA name: Ala_AGC_chr6:28763741-28763812 (-)
  source 1..83: mol_type = other DNA
ggtagcgtggccgagcggtctaaggcgctggattaaggctccagtctcttcgggggcgtgggttcgaatcccaccgctgccag

SEQ ID NO: 361 - DNA, 74 bp, synthetic construct
  misc_feature 1..74: note = Description of sequence: transcripted tRNA sequence; tRNA name: Ala_AGC_chr6:28763741-28763812 (-)
  source 1..74: mol_type = other DNA
tgcctccttagcgcagtaggcagcgcgtcagtctcataatctgaaggtcctgagttcgaacctcagagggggca

SEQ ID NO: 362 - DNA, 74 bp, synthetic construct
  misc_feature 1..74: note = Description of sequence: transcripted tRNA sequence; tRNA name: Ala_AGC_chr6:28763741-28763812 (-)
  source 1..74: mol_type = other DNA
agcccggatagctcagtcggtagagcatcagacttttaatctgagggtccagggttcaagtccctgttcgggcg

SEQ ID NO: 363 - DNA, 74 bp, synthetic construct
  misc_feature 1..74: note = Description of sequence: transcripted tRNA sequence; tRNA name: Ala_AGC_chr6:28763741-28763812 (-)
  source 1..74: mol_type = other DNA
gcctccttagcgcagtaggcagcgcgtcagtctcataatctgaaggtcctgagttcgaacctcagagggggcag

SEQ ID NO: 364 - DNA, 73 bp, synthetic construct
  misc_feature 1..73: note = Description of sequence: transcripted tRNA sequence; tRNA name: Ala_AGC_chr6:28763741-28763812 (-)
  source 1..73: mol_type = other DNA
ttccctggtggtctagtggttaggattcggcgctctcaccgccgcggcccgggttcgattcccggtcagggaa

SEQ ID NO: 365 - DNA, 84 bp, synthetic construct
  misc_feature 1..84: note = Description of sequence: transcripted tRNA sequence; tRNA name: Ala_AGC_chr6:28763741-28763812 (-)
  source 1..84: mol_type = other DNA
caccaggatggccgagtggttaaggcgttggacttaagatccaatggacatatgtccgcgtgggttcgaaccccactcctggta

SEQ ID NO: 366 - DNA, 73 bp, synthetic construct
  misc_feature 1..73: note = Description of sequence: transcripted tRNA sequence; tRNA name: Ala_AGC_chr6:28763741-28763812 (-)
  source 1..73: mol_type = other DNA
tggctcgttggtctaggggtatgattctcgcttagggtgcgagaggtcccgggttcaaatcccggacgagccc

SEQ ID NO: 367 - DNA, 74 bp, synthetic construct
  misc_feature 1..74: note = Description of sequence: transcripted tRNA sequence; tRNA name: Ala_AGC_chr6:28763741-28763812 (-)
  source 1..74: mol_type = other DNA
agccccagtggcctaatggataaggcattggcctcctaagccagggattgtgggttcgagtcccatctggggtg

SEQ ID NO: 368 - DNA, 73 bp, synthetic construct
  misc_feature 1..73: note = Description of sequence: transcripted tRNA sequence; tRNA name: Ala_AGC_chr6:28763741-28763812 (-)
  source 1..73: mol_type = other DNA
ggggatatagctcaggggtagagcatttgactgcagatcaagaggtccccggttcaaatccgggtgccccccc

SEQ ID NO: 369 - DNA, 94 bp, synthetic construct
  misc_feature 1..94: note = Description of sequence: transcripted tRNA sequence; tRNA name: Ala_AGC_chr6:28763741-28763812 (-)
  source 1..94: mol_type = other DNA
cccttcgatagctcagctggtagagcggaggactgtagctacttcctcagcaggagacatccttaggtcgctggttcgattccggctcgaagga

SEQ ID NO: 370 - DNA, 90 bp, synthetic construct
  misc_feature 1..90: note = Description of sequence: transcripted tRNA sequence; tRNA name: Ala_AGC_chr6:28763741-28763812 (-)
  source 1..90: mol_type = other DNA
cccttcgatagctcagctggtagagcggaggactgtaggcgcgcgcccgtggccatccttaggtcgctggttcgattccggctcgaagga

SEQ ID NO: 371 - DNA, 74 bp, synthetic construct
  misc_feature 1..74: note = Description of sequence: transcripted tRNA sequence; tRNA name: Ala_AGC_chr6:28763741-28763812 (-)
  source 1..74: mol_type = other DNA
tgggggattagctcaaatggtagagcgctcgcttagcatgcgagaggtagcgggatcgatgcccgcatcctcca

SEQ ID NO: 372 - DNA, 83 bp, synthetic construct
  misc_feature 1..83: note = Description of sequence: transcripted tRNA sequence; tRNA name: Ala_AGC_chr6:28763741-28763812 (-)
  source 1..83: mol_type = other DNA
gtagtcgtggccgagtggttaaggcgatggactagaaatccattggggtctccccgcgcaggttcgaatcctgccgactacgg

SEQ ID NO: 373 - DNA, 74 bp, synthetic construct
  misc_feature 1..74: note = Description of sequence: transcripted tRNA sequence; tRNA name: Ala_AGC_chr6:28763741-28763812 (-)
  source 1..74: mol_type = other DNA
gcctcgttagcgcagtaggtagcgcgtcagtctcataatctgaaggtcgtgagttcgatcctcacacggggcac

SEQ ID NO: 374 - DNA, 92 bp, synthetic construct
  misc_feature 1..92: note = Description of sequence: transcripted tRNA sequence; tRNA name: Ala_AGC_chr6:28763741-28763812 (-)
  source 1..92: mol_type = other DNA
ggctctgtggcgcaatggatagcgcattggacttctagctgagcctagtgtggtcattcaaaggttgtgggttcgagtcccaccagagtcga

SEQ ID NO: 375 - DNA, 75 bp, synthetic construct
  misc_feature 1..75: note = Description of sequence: transcripted tRNA sequence; tRNA name: Ala_AGC_chr6:28763741-28763812 (-)
  source 1..75: mol_type = other DNA
gtctctgtggcgcaatcggttagcgcgttcggctgttaaccgaaaggttggtggttcgagcccacccagggacgc

SEQ ID NO: 376 - DNA, 83 bp, synthetic construct
  misc_feature 1..83: note = Description of sequence: transcripted tRNA sequence; tRNA name: Ala_AGC_chr6:28763741-28763812 (-)
  source 1..83: mol_type = other DNA
ggcagcgatggccgagtggttaaggcgttggacttgaaatccaatggggtctccccgcgcaggttcgaaccctgctcgctgcg

SEQ ID NO: 377 - DNA, 74 bp, synthetic construct
  misc_feature 1..74: note = Description of sequence: transcripted tRNA sequence; tRNA name: Ala_AGC_chr6:28763741-28763812 (-)
  source 1..74: mol_type = other DNA
ggttccatagtgtagtggttatcacgtctgctttacacgcagaaggtcctgggttcgagccccagtggaaccat

SEQ ID NO: 378 - DNA, 74 bp, synthetic construct
  misc_feature 1..74: note = Description of sequence: transcripted tRNA sequence; tRNA name: Ala_AGC_chr6:28763741-28763812 (-)
  source 1..74: mol_type = other DNA
ggttccatagtgtagcggttatcacgtctgctttacacgcagaaggtcctgggttcgagccccagtggaaccac

SEQ ID NO: 379 - DNA, 87 bp, synthetic construct
  misc_feature 1..87: note = Description of sequence: transcripted tRNA sequence; tRNA name: Ala_AGC_chr6:28763741-28763812 (-)
  source 1..87: mol_type = other DNA
tggctctgtggcgcaatggatagcgcattggacttctagatagttagagaaattcaaaggttgtgggttcgagtcccaccagagtcg

SEQ ID NO: 380 - DNA, 84 bp, synthetic construct
  misc_feature 1..84: note = Description of sequence: transcripted tRNA sequence; tRNA name: Ala_AGC_chr6:28763741-28763812 (-)
  source 1..84: mol_type = other DNA
taccagaatggccgagtggttaaggcgttggacttaagatccaatggattcatatccgcgtgggttcgaaccccacttctggta

SEQ ID NO: 381 - DNA, 74 bp, synthetic construct
  misc_feature 1..74: note = Description of sequence: transcripted tRNA sequence; tRNA name: Ala_AGC_chr6:28763741-28763812 (-)
  source 1..74: mol_type = other DNA
ggcccggatagctcagtcggtagagcatcagacttttaatctgagggtccggggttcaagtccctgttcgggcg

SEQ ID NO: 382 - DNA, 74 bp, synthetic construct
  misc_feature 1..74: note = Description of sequence: transcripted tRNA sequence; tRNA name: Ala_AGC_chr6:28763741-28763812 (-)
  source 1..74: mol_type = other DNA
gccgaaatagctcagttgggagagcgttagactgaagatctaaaggtccctggttcgatcccgggtttcggcag

SEQ ID NO: 383 - DNA, 74 bp, synthetic construct
  misc_feature 1..74: note = Description of sequence: transcripted tRNA sequence; tRNA name: Ala_AGC_chr6:28763741-28763812 (-)
  source 1..74: mol_type = other DNA
gcccggatagctcagtcggtagagcatcagacttttaatctgagggtccagggttcaagtccctgttcgggcgg

SEQ ID NO: 384 - DNA, 74 bp, synthetic construct
  misc_feature 1..74: note = Description of sequence: transcripted tRNA sequence; tRNA name: Ala_AGC_chr6:28763741-28763812 (-)
  source 1..74: mol_type = other DNA
gccgaaatagctcagttgggagagcgttagactgaagatctaaaggtccctggttcaatcccgggtttcggcag

SEQ ID NO: 385 - DNA, 83 bp, synthetic construct
  misc_feature 1..83: note = Description of sequence: transcripted tRNA sequence; tRNA name: Ala_AGC_chr6:28763741-28763812 (-)
  source 1..83: mol_type = other DNA
ggacgaggtggccgagtggttaaggcgatggactgctaatccattgtgctttgcacgcgtgggttcgaatcccatcctcgtcg

SEQ ID NO: 386 - DNA, 73 bp, synthetic construct
  misc_feature 1..73: note = Description of sequence: transcripted tRNA sequence; tRNA name: Ala_AGC_chr6:28763741-28763812 (-)
  source 1..73: mol_type = other DNA
ggctcgttggtctaggggtatgattctcggtttgggtccgagaggtcccgggttcaaatcccggacgagcccc

SEQ ID NO: 387 - DNA, 83 bp, synthetic construct
  misc_feature 1..83: note = Description of sequence: transcripted tRNA sequence; tRNA name: Ala_AGC_chr6:28763741-28763812 (-)
  source 1..83: mol_type = other DNA
agtcacggtggccgagtggttaaggcgttggactcgaaatccaatggggtttccccgcacaggttcgaatcctgttcgtgacg

SEQ ID NO: 388 - DNA, 73 bp, synthetic construct
  misc_feature 1..73: note = Description of sequence: transcripted tRNA sequence; tRNA name: Ala_AGC_chr6:28763741-28763812 (-)
  source 1..73: mol_type = other DNA
ctcctcgttagtatagtggttagtatccccgcctgtcacgcgggagaccggggttcaattccccgacggggag

SEQ ID NO: 389 - DNA, 73 bp, synthetic construct
  misc_feature 1..73: note = Description of sequence: transcripted tRNA sequence; tRNA name: Ala_AGC_chr6:28763741-28763812 (-)
  source 1..73: mol_type = other DNA
ggacctcgtggcgcaacggtagcgcgtctgactccagatcagaaggctgcgtgttcgaatcacgtcggggtca

SEQ ID NO: 390 - DNA, 73 bp, synthetic construct
  misc_feature 1..73: note = Description of sequence: transcripted tRNA sequence; tRNA name: Ala_AGC_chr6:28763741-28763812 (-)
  source 1..73: mol_type = other DNA
ggggatgtagctcagtggtagagcgcatgctttgcatgtatgaggccccgggttcgatccccggcatctccat

SEQ ID NO: 391 - DNA, 74 bp, synthetic construct
  misc_feature 1..74: note = Description of sequence: transcripted tRNA sequence; tRNA name: Ala_AGC_chr6:28763741-28763812 (-)
  source 1..74: mol_type = other DNA
gccgaaatagctcagttgggagagcgttagactgaagatctaaaggtccctggttcgatcccgggtttcggcac

SEQ ID NO: 392 - DNA, 73 bp, synthetic construct
  misc_feature 1..73: note = Description of sequence: transcripted tRNA sequence; tRNA name: Ala_AGC_chr6:28763741-28763812 (-)
  source 1..73: mol_type = other DNA
aggggatgtagctcagtggtagagcgcatgctttgcacgtatgaggccccgggttcaatccccggcatctcca

SEQ ID NO: 393 - DNA, 75 bp, synthetic construct
  misc_feature 1..75: note = Description of sequence: transcripted tRNA sequence; tRNA name: Ala_AGC_chr6:28763741-28763812 (-)
  source 1..75: mol_type = other DNA
gtctctgtggcgcaatcggttagcgcgttcggctgttaaccgaaaggttggtggttcgagcccacccagggacgg

SEQ ID NO: 394 - DNA, 73 bp, synthetic construct
  misc_feature 1..73: note = Description of sequence: transcripted tRNA sequence; tRNA name: Ala_AGC_chr6:28763741-28763812 (-)
  source 1..73: mol_type = other DNA
tcccacatggtctagcggttaggattcctggttttcacccaggcggcccgggttcgactcccggtgtgggaac

SEQ ID NO: 395 - DNA, 74 bp, synthetic construct
  misc_feature 1..74: note = Description of sequence: transcripted tRNA sequence; tRNA name: Ala_AGC_chr6:28763741-28763812 (-)
  source 1..74: mol_type = other DNA
ggctccatagctcaggggttagagcgctggtcttgtaaaccaggggtcgcgagttcaattctcgctggggcctg

SEQ ID NO: 396 - DNA, 83 bp, synthetic construct
  misc_feature 1..83: note = Description of sequence: transcripted tRNA sequence; tRNA name: Ala_AGC_chr6:28763741-28763812 (-)
  source 1..83: mol_type = other DNA
tggtagtgtggccgagcggtctaaggcgctggatttaggctccagtctcttcgggggcgtgggttcgaatcccaccactgcca

SEQ ID NO: 397 - DNA, 74 bp, synthetic construct
  misc_feature 1..74: note = Description of sequence: transcripted tRNA sequence; tRNA name: Ala_AGC_chr6:28763741-28763812 (-)
  source 1..74: mol_type = other DNA
ggctccatagctcaggggttagagcactggtcttgtaaaccaggggtcgcgagttcaaatctcgctggggcctc

SEQ ID NO: 398 - DNA, 73 bp, synthetic construct
  misc_feature 1..73: note = Description of sequence: transcripted tRNA sequence; tRNA name: Ala_AGC_chr6:28763741-28763812 (-)
  source 1..73: mol_type = other DNA
tggctcgttggtctagtggtatgattctcgctttgggtgcgagaggtcccgggttcaaatcccggacgagccc

SEQ ID NO: 399 - DNA, 95 bp, synthetic construct
  misc_feature 1..95: note = Description of sequence: transcripted tRNA sequence; tRNA name: Ala_AGC_chr6:28763741-28763812 (-)
  source 1..95: mol_type = other DNA
ccttcgatagctcagctggtagagcggaggactgtagattgtacagacatttgcggacatccttaggtcgctggttcgattccggctcgaaggaa

SEQ ID NO: 400 - DNA, 74 bp, synthetic construct
  misc_feature 1..74: note = Description of sequence: transcripted tRNA sequence; tRNA name: Ala_AGC_chr6:28763741-28763812 (-)
  source 1..74: mol_type = other DNA
aggccctatagctcaggggttagagcactggtcttgtaaaccaggggtcgcgagttcaaatctcgctggggcct

SEQ ID NO: 401 - DNA, 90 bp, synthetic construct
  misc_feature 1..90: note = Description of sequence: transcripted tRNA sequence; tRNA name: Ala_AGC_chr6:28763741-28763812 (-)
  source 1..90: mol_type = other DNA
tccttcgatagctcagctggtagagcggaggactgtagtacttaatgtgtggtcatccttaggtcgctggttcgattccggctcgaagga

SEQ ID NO: 402 - DNA, 73 bp, synthetic construct
  misc_feature 1..73: note = Description of sequence: transcripted tRNA sequence; tRNA name: Ala_AGC_chr6:28763741-28763812 (-)
  source 1..73: mol_type = other DNA
tggctcgttggtctaggggtatgattctcgctttgggtgcgagaggtcccgggttcaaatcccggacgagccc

SEQ ID NO: 403 - DNA, 74 bp, synthetic construct
  misc_feature 1..74: note = Description of sequence: transcripted tRNA sequence; tRNA name: Ala_AGC_chr6:28763741-28763812 (-)
  source 1..74: mol_type = other DNA
gcccggctagctcagtcggtagagcatgggactcttaatcccagggtcgtgggttcgagccccacgttgggcgc

SEQ ID NO: 404 - DNA, 75 bp, synthetic construct
  misc_feature 1..75: note = Description of sequence: transcripted tRNA sequence; tRNA name: Ala_AGC_chr6:28763741-28763812 (-)
  source 1..75: mol_type = other DNA
cggccggttagctcagttggttagagcgtggtgctaataacgccaaggtcgcgggttcgatccccgtacgggcca

SEQ ID NO: 405 - DNA, 73 bp, synthetic construct
  misc_feature 1..73: note = Description of sequence: transcripted tRNA sequence; tRNA name: Ala_AGC_chr6:28763741-28763812 (-)
  source 1..73: mol_type = other DNA
tcccacatggtctagcggttaggattcctggttttcacccaggcggcccgggttcgactcccggtgtgggaat

SEQ ID NO: 406 - DNA, 83 bp, synthetic construct
  misc_feature 1..83: note = Description of sequence: transcripted tRNA sequence; tRNA name: Ala_AGC_chr6:28763741-28763812 (-)
  source 1..83: mol_type = other DNA
gacgaggtggccgagtggttaaggcgatggactgctaatccattgtgctctgcacgcgtgggttcgaatcccatcctcgtcga

SEQ ID NO: 407 - DNA, 73 bp, synthetic construct
  misc_feature 1..73: note = Description of sequence: transcripted tRNA sequence; tRNA name: Ala_AGC_chr6:28763741-28763812 (-)
  source 1..73: mol_type = other DNA
gccgtgatcgtatagtggttagtactctgcgttgtggccgcagcaacctcggttcgaatccgagtcacggcat

SEQ ID NO: 408 - DNA, 73 bp, synthetic construct
  misc_feature 1..73: note = Description of sequence: transcripted tRNA sequence; tRNA name: Ala_AGC_chr6:28763741-28763812 (-)
  source 1..73: mol_type = other DNA
cgccgtgatcgtatagtggttagtactctgcgttgtggccgcagcaacctcggttcgaatccgagtcacggca

SEQ ID NO: 409 - DNA, 73 bp, synthetic construct
  misc_feature 1..73: note = Description of sequence: transcripted tRNA sequence; tRNA name: Ala_AGC_chr6:28763741-28763812 (-)
  source 1..73: mol_type = other DNA
ggttccatggtgtaatggttagcactctggactctgaatccagcgatccgagttcaaatctcggtggaacctg

SEQ ID NO: 410 - DNA, 74 bp, synthetic construct
  misc_feature 1..74: note = Description of sequence: transcripted tRNA sequence; tRNA name: Ala_AGC_chr6:28763741-28763812 (-)
  source 1..74: mol_type = other DNA
tgcccggctagctcagtcggtagagcatgggactcttaatcccagggtcgtgggttcgagccccacgttgggcg

SEQ ID NO: 411 - DNA, 74 bp, synthetic construct
  misc_feature 1..74: note = Description of sequence: transcripted tRNA sequence; tRNA name: Ala_AGC_chr6:28763741-28763812 (-)
  source 1..74: mol_type = other DNA
gggccgcgtggcctaatggataaggcgtctgacttcggatcagaagattgcaggttcgagtcctgccgcggtcg

SEQ ID NO: 412 - DNA, 72 bp, synthetic construct
  misc_feature 1..72: note = Description of sequence: transcripted tRNA sequence; tRNA name: Ala_AGC_chr6:28763741-28763812 (-)
  source 1..72: mol_type = other DNA
gcgccgctggtgtagtggtatcatgcaagattcccattcttgcgacccgggttcgattcccgggcggcgcac

SEQ ID NO: 413 - DNA, 74 bp, synthetic construct
  misc_feature 1..74: note = Description of sequence: transcripted tRNA sequence; tRNA name: Ala_AGC_chr6:28763741-28763812 (-)
  source 1..74: mol_type = other DNA
gggccgcgtggcctaatggataaggcgtctgattccggatcagaagattgagggttcgagtcccttcgtggtcg

SEQ ID NO: 414 - DNA, 74 bp, synthetic construct
  misc_feature 1..74: note = Description of sequence: transcripted tRNA sequence; tRNA name: Ala_AGC_chr6:28763741-28763812 (-)
  source 1..74: mol_type = other DNA
cgccccggtggcctaatggataaggcattggcctcctaagccagggattgtgggttcgagtcccacccggggta

SEQ ID NO: 415 - DNA, 74 bp, synthetic construct
  misc_feature 1..74: note = Description of sequence: transcripted tRNA sequence; tRNA name: Ala_AGC_chr6:28763741-28763812 (-)
  source 1..74: mol_type = other DNA
gcccggctagctcagtcggtagagcatgagacccttaatctcagggtcgtgggttcgagccccacgttgggcgt

SEQ ID NO: 416 - DNA, 73 bp, synthetic construct
  misc_feature 1..73: note = Description of sequence: transcripted tRNA sequence; tRNA name: Ala_AGC_chr6:28763741-28763812 (-)
  source 1..73: mol_type = other DNA
aggcgcggtggccaagtggtaaggcgtcggtctcgtaaaccgaagatcacgggttcgaaccccgtccgtgcct

SEQ ID NO: 417 - DNA, 83 bp, synthetic construct
  misc_feature 1..83: note = Description of sequence: transcripted tRNA sequence; tRNA name: Ala_AGC_chr6:28763741-28763812 (-)
  source 1..83: mol_type = other DNA
ggtagcgtggccgagtggtctaaggcgctggatttaggctccagtcatttcgatggcgtgggttcgaatcccaccgctgccac

SEQ ID NO: 418 - DNA, 83 bp, synthetic construct
  misc_feature 1..83: note = Description of sequence: transcripted tRNA sequence; tRNA name: Ala_AGC_chr6:28763741-28763812 (-)
  source 1..83: mol_type = other DNA
gggtagcgtggccgagcggtctaaggcgctggattaaggctccagtctcttcgggggcgtgggttcgaatcccaccgctgcca

SEQ ID NO: 419 - DNA, 84 bp, synthetic construct
  misc_feature 1..84: note = Description of sequence: transcripted tRNA sequence; tRNA name: Ala_AGC_chr6:28763741-28763812 (-)
  source 1..84: mol_type = other DNA
agtcaggatggccgagcggtctaaggcgctgcgttcaggtcgcagtctcccctggaggcgtgggttcgaatcccacttctgaca

SEQ ID NO: 420 - DNA, 84 bp, synthetic construct
  misc_feature 1..84: note = Description of sequence: transcripted tRNA sequence; tRNA name: Ala_AGC_chr6:28763741-28763812 (-)
  source 1..84: mol_type = other DNA
gtcaggatggccgagcggtctaaggcgctgcgttcaggtcgcagtctcccctggaggcgtgggttcgaatcccacttctgacag

SEQ ID NO: 421 - DNA, 74 bp, synthetic construct
  misc_feature 1..74: note = Description of sequence: transcripted tRNA sequence; tRNA name: Ala_AGC_chr6:28763741-28763812 (-)
  source 1..74: mol_type = other DNA
gcctcgttagcgcagtaggcagcgcgtcagtctcataatctgaaggtcgtgagttcgagcctcacacggggcag

SEQ ID NO: 422 - DNA, 83 bp, synthetic construct
  misc_feature 1..83: note = Description of sequence: transcripted tRNA sequence; tRNA name: Ala_AGC_chr6:28763741-28763812 (-)
  source 1..83: mol_type = other DNA
ggtagcgtggccgagcggtctaaggcgctggatttaggctccagtctcttcggaggcgtgggttcgaatcccaccgctgccag

SEQ ID NO: 423 - DNA, 89 bp, synthetic construct
  misc_feature 1..89: note = Description of sequence: transcripted tRNA sequence; tRNA name: Ala_AGC_chr6:28763741-28763812 (-)
  source 1..89: mol_type = other DNA
tggctctgtggcgcaatggatagcgcattggacttctagtgacgaatagagcaattcaaaggttgtgggttcgaatcccaccagagtcg

SEQ ID NO: 424 - DNA, 72 bp, synthetic construct
  misc_feature 1..72: note = Description of sequence: transcripted tRNA sequence; tRNA name: Ala_AGC_chr6:28763741-28763812 (-)
  source 1..72: mol_type = other DNA
cgcattggtggttcagtggtagaattctcgcctgccacgcgggaggcccgggttcgattcccggccaatgca

SEQ ID NO: 425 - DNA, 83 bp, synthetic construct
  misc_feature 1..83: note = Description of sequence: transcripted tRNA sequence; tRNA name: Ala_AGC_chr6:28763741-28763812 (-)
  source 1..83: mol_type = other DNA
gctgtgatggccgagtggttaaggcgttggactcgaaatccaatggggtctccccgcgcaggttcgaatcctgctcacagcgt

SEQ ID NO: 426 - DNA, 75 bp, synthetic construct
  misc_feature 1..75: note = Description of sequence: transcripted tRNA sequence; tRNA name: Ala_AGC_chr6:28763741-28763812 (-)
  source 1..75: mol_type = other DNA
ggcgccgtggcttagctggttaaagcgcctgtctagtaaacaggagatcctgggttcgaatcccagcggtgcctg

SEQ ID NO: 427 - DNA, 73 bp, synthetic construct
  misc_feature 1..73: note = Description of sequence: transcripted tRNA sequence; tRNA name: Ala_AGC_chr6:28763741-28763812 (-)
  source 1..73: mol_type = other DNA
cgacctcgtggcgcaacggtagcgcgtctgactccagatcagaaggttgcgtgttcaaatcacgtcggggtca

SEQ ID NO: 428 - DNA, 83 bp, synthetic construct
  misc_feature 1..83: note = Description of sequence: transcripted tRNA sequence; tRNA name: Ala_AGC_chr6:28763741-28763812 (-)
  source 1..83: mol_type = other DNA
agacgaggtggccgagtggttaaggcgatggactgctaatccattgtgctctgcacgcgtgggttcgaatcccatcctcgtcg

SEQ ID NO: 429 - DNA, 75 bp, synthetic construct
  misc_feature 1..75: note = Description of sequence: transcripted tRNA sequence; tRNA name: Ala_AGC_chr6:28763741-28763812 (-)
  source 1..75: mol_type = other DNA
cggcgccgtggcttagttggttaaagcgcctgtctagtaaacaggagatcctgggttcgaatcccagcggtgcct

SEQ ID NO: 430 - DNA, 73 bp, synthetic construct
  misc_feature 1..73: note = Description of sequence: transcripted tRNA sequence; tRNA name: Ala_AGC_chr6:28763741-28763812 (-)
  source 1..73: mol_type = other DNA
ggcctcgtggcgcaacggtagcgcgtctgactccagatcagaaggttgcgtgttcaaatcacgtcggggtcaa

SEQ ID NO: 431 - DNA, 73 bp, synthetic construct
  misc_feature 1..73: note = Description of sequence: transcripted tRNA sequence; tRNA name: Ala_AGC_chr6:28763741-28763812 (-)
  source 1..73: mol_type = other DNA
agcgttggtggtatagtggtaagcatagctgccttccaagcagttgacccgggttcgattcccggccaacgca

SEQ ID NO: 432 - DNA, 73 bp, synthetic construct
  misc_feature 1..73: note = Description of sequence: transcripted tRNA sequence; tRNA name: Ala_AGC_chr6:28763741-28763812 (-)
  source 1..73: mol_type = other DNA
tcctcgttagtatagtggtgagtatccccgcctgtcacgcgggagaccggggttcgattccccgacggggaga

SEQ ID NO: 433 - DNA, 73 bp, synthetic construct
  misc_feature 1..73: note = Description of sequence: transcripted tRNA sequence; tRNA name: Ala_AGC_chr6:28763741-28763812 (-)
  source 1..73: mol_type = other DNA
ggctcgttggtctaggggtatgattctcgcttcgggtgcgagaggtcccgggttcaaatcccggacgagccct

SEQ ID NO: 434 - DNA, 75 bp, synthetic construct
  misc_feature 1..75: note = Description of sequence: transcripted tRNA sequence; tRNA name: Ala_AGC_chr6:28763741-28763812 (-)
  source 1..75: mol_type = other DNA
ggcgccgtggcttagttggttaaagcgcctgtctagtaaacaggagatcctgggttcgaatcccagcggtgcctt

SEQ ID NO: 435 - DNA, 83 bp, synthetic construct
  misc_feature 1..83: note = Description of sequence: transcripted tRNA sequence; tRNA name: Ala_AGC_chr6:28763741-28763812 (-)
  source 1..83: mol_type = other DNA
gtagtcgtggccgagtggttaaggcgatggactagaaatccattggggtctccccgcgcaggttcgaatcctgccgactacgt

SEQ ID NO: 436 - DNA, 73 bp, synthetic construct
  misc_feature 1..73: note = Description of sequence: transcripted tRNA sequence; tRNA name: Ala_AGC_chr6:28763741-28763812 (-)
  source 1..73: mol_type = other DNA
tgacctcgtggcgcaatggtagcgcgtctgactccagatcagaaggttgcgtgttcaagtcacgtcggggtca

SEQ ID NO: 437 - DNA, 73 bp, synthetic construct
  misc_feature 1..73: note = Description of sequence: transcripted tRNA sequence; tRNA name: Ala_AGC_chr6:28763741-28763812 (-)
  source 1..73: mol_type = other DNA
aggcgcggtggccaagtggtaaggcgtcggtctcgtaaaccgaagatcgcgggttcgaaccccgtccgtgcct

SEQ ID NO: 438 - DNA, 73 bp, synthetic construct
  misc_feature 1..73: note = Description of sequence: transcripted tRNA sequence; tRNA name: Ala_AGC_chr6:28763741-28763812 (-)
  source 1..73: mol_type = other DNA
agggggtatagctcagtggtagagcatttgactgcagatcaagaggtccccggttcaaatccgggtgccccct

SEQ ID NO: 439 - DNA, 73 bp, synthetic construct
  misc_feature 1..73: note = Description of sequence: transcripted tRNA sequence; tRNA name: Ala_AGC_chr6:28763741-28763812 (-)
  source 1..73: mol_type = other DNA
gggggtatagctcagtggtagagcatttgactgcagatcaagaggtccctggttcaaatccgggtgccccctc

SEQ ID NO: 440 - DNA, 73 bp, synthetic construct
  misc_feature 1..73: note = Description of sequence: transcripted tRNA sequence; tRNA name: Ala_AGC_chr6:28763741-28763812 (-)
  source 1..73: mol_type = other DNA
gggggtatagctcagtggtagagcatttgactgcagatcaagaggtccccggttcaaatccgggtgccccctc

SEQ ID NO: 441 - DNA, 73 bp, synthetic construct
  misc_feature 1..73: note = Description of sequence: transcripted tRNA sequence; tRNA name: Ala_AGC_chr6:28763741-28763812 (-)
  source 1..73: mol_type = other DNA
aggtcccatggtgtaatggttagcactctggactttgaatccagcgatccgagttcaaatctcggtgggacct

SEQ ID NO: 442 - DNA, 74 bp, synthetic construct
  misc_feature 1..74: note = Description of sequence: transcripted tRNA sequence; tRNA name: Ala_AGC_chr6:28763741-28763812 (-)
  source 1..74: mol_type = other DNA
gacccagtggcctaatggataaggcatcagcctccggagctggggattgtgggttcgagtcccatctgggtcgc

SEQ ID NO: 443 - DNA, 74 bp, synthetic construct
  misc_feature 1..74: note = Description of sequence: transcripted tRNA sequence; tRNA name: Ala_AGC_chr6:28763741-28763812 (-)
  source 1..74: mol_type = other DNA
agccccagtggcctaatggataaggcactggcctcctaagccagggattgtgggttcgagtcccacctggggta

SEQ ID NO: 444 - DNA, 74 bp, synthetic construct
  misc_feature 1..74: note = Description of sequence: transcripted tRNA sequence; tRNA name: Ala_AGC_chr6:28763741-28763812 (-)
  source 1..74: mol_type = other DNA
gccccagtggcctaatggataaggcactggcctcctaagccagggattgtgggttcgagtcccacctggggtgt

SEQ ID NO: 445 - DNA, 74 bp, synthetic construct
  misc_feature 1..74: note = Description of sequence: transcripted tRNA sequence; tRNA name: Ala_AGC_chr6:28763741-28763812 (-)
  source 1..74: mol_type = other DNA
agaccgcgtggcctaatggataaggcgtctgacttcggatcagaagattgagggttcgagtcccttcgtggtcg

SEQ ID NO: 446 - DNA, 75 bp, synthetic construct
  misc_feature 1..75: note = Description of sequence: transcripted tRNA sequence; tRNA name: Ala_AGC_chr6:28763741-28763812 (-)
  source 1..75: mol_type = other DNA
cgtctctgtggcgcaatcggttagcgcgttcggctgttaaccgaaaggttggtggttcgagcccacccagggacg

SEQ ID NO: 447 - DNA, 73 bp, synthetic construct
  misc_feature 1..73: note = Description of sequence: transcripted tRNA sequence; tRNA name: Ala_AGC_chr6:28763741-28763812 (-)
  source 1..73: mol_type = other DNA
ggcgttggtggtatagtggttagcatagctgccttccaagcagttgacccgggttcgattcccggccaacgca

SEQ ID NO: 448 - DNA, 74 bp, synthetic construct
  misc_feature 1..74: note = Description of sequence: transcripted tRNA sequence; tRNA name: Ala_AGC_chr6:28763741-28763812 (-)
  source 1..74: mol_type = other DNA
gtttccgtagtgtagcggttatcacattcgcctcacacgcgaaaggtccccggttcgatcccgggcggaaacag

SEQ ID NO: 449 - DNA, 75 bp, synthetic construct
  misc_feature 1..75: note = Description of sequence: transcripted tRNA sequence; tRNA name: Ala_AGC_chr6:28763741-28763812 (-)
  source 1..75: mol_type = other DNA
tggcgccgtggcttagttggttaaagcgcctgtctagtaaacaggagatcctgggttcgaatcccagcggtgcct

SEQ ID NO: 450 - DNA, 94 bp, synthetic construct
  misc_feature 1..94: note = Description of sequence: transcripted tRNA sequence; tRNA name: Ala_AGC_chr6:28763741-28763812 (-)
  source 1..94: mol_type = other DNA
gctccagtggcgcaatcggttagcgcgcggtacttatatgacagtgcgagcggagcaatgccgaggttgtgagttcgatcctcacctggagcac

SEQ ID NO: 451 - DNA, 72 bp, synthetic construct
  misc_feature 1..72: note = Description of sequence: transcripted tRNA sequence; tRNA name: Ala_AGC_chr6:28763741-28763812 (-)
  source 1..72: mol_type = other DNA
gcatgggtggttcagtggtagaattctcgcctgccacgcgggaggcccgggttcgattcccggcccatgcag

SEQ ID NO: 452 - DNA, 18 bp, synthetic construct
  misc_feature 1..18: note = Description of sequence: Exemplary variable region sequence
  source 1..18: mol_type = other DNA
aaaatataaatatatttc

SEQ ID NO: 453-454 - skipped (2 entries)

SEQ ID NO: 455 - DNA, 15 bp, synthetic construct
  misc_feature 1..15: note = Description of sequence: Exemplary variable region sequence
  source 1..15: mol_type = other DNA
aattcttcggaatgt

SEQ ID NO: 456-460 - skipped (5 entries)

SEQ ID NO: 461 - DNA, 20 bp, synthetic construct
  misc_feature 1..20: note = Description of sequence: Exemplary variable region sequence
  source 1..20: mol_type = other DNA
caggcgggttctgcccgcgc

SEQ ID NO: 462 - DNA, 18 bp, synthetic construct
  misc_feature 1..18: note = Description of sequence: Exemplary variable region sequence
  source 1..18: mol_type = other DNA
catacctgcaagggtatc

SEQ ID NO: 463 - DNA, 15 bp, synthetic construct
  misc_feature 1..15: note = Description of sequence: Exemplary variable region sequence
  source 1..15: mol_type = other DNA
cgaccgcaaggttgt

SEQ ID NO: 464 - DNA, 15 bp, synthetic construct
  misc_feature 1..15: note = Description of sequence: Exemplary variable region sequence
  source 1..15: mol_type = other DNA
cgaccttgcggtcat

SEQ ID NO: 465 - DNA, 18 bp, synthetic construct
  misc_feature 1..18: note = Description of sequence: Exemplary variable region sequence
  source 1..18: mol_type = other DNA
cgatgctaatcacatcgt

SEQ ID NO: 466 - DNA, 15 bp, synthetic construct
  misc_feature 1..15: note = Description of sequence: Exemplary variable region sequence
  source 1..15: mol_type = other DNA
cgatggtgacatcat

SEQ ID NO: 467 - DNA, 16 bp, synthetic construct
  misc_feature 1..16: note = Description of sequence: Exemplary variable region sequence
  source 1..16: mol_type = other DNA
cgatggtttacatcgt

SEQ ID NO: 468 - DNA, 13 bp, synthetic construct
  misc_feature 1..13: note = Description of sequence: Exemplary variable region sequence
  source 1..13: mol_type = other DNA
cgccgtaaggtgt

SEQ ID NO: 469 - DNA, 12 bp, synthetic construct
  misc_feature 1..12: note = Description of sequence: Exemplary variable region sequence
  source 1..12: mol_type = other DNA
cgccttaggtgt

SEQ ID NO: 470 - DNA, 15 bp, synthetic construct
  misc_feature 1..15: note = Description of sequence: Exemplary variable region sequence
  source 1..15: mol_type = other DNA
cgcctttcgacgcgt

SEQ ID NO: 471 - DNA, 13 bp, synthetic construct
  misc_feature 1..13: note = Description of sequence: Exemplary variable region sequence
  source 1..13: mol_type = other DNA
cgcttcacggcgt

SEQ ID NO: 472 - DNA, 15 bp, synthetic construct
  misc_feature 1..15: note = Description of sequence: Exemplary variable region sequence
  source 1..15: mol_type = other DNA
cggcagcaatgctgt

SEQ ID NO: 473 - DNA, 13 bp, synthetic construct
  misc_feature 1..13: note = Description of sequence: Exemplary variable region sequence
  source 1..13: mol_type = other DNA
cggctccgccttc

SEQ ID NO: 474 - DNA, 16 bp, synthetic construct
  misc_feature 1..16: note = Description of sequence: Exemplary variable region sequence
  source 1..16: mol_type = other DNA
cgggtatcacagggtc

SEQ ID NO: 475 - DNA, 17 bp, synthetic construct
  misc_feature 1..17: note = Description of sequence: Exemplary variable region sequence
  source 1..17: mol_type = other DNA
cggtgcgcaagcgctgt

SEQ ID NO: 476 - DNA, 18 bp, synthetic construct
  misc_feature 1..18: note = Description of sequence: Exemplary variable region sequence
  source 1..18: mol_type = other DNA
cgtacgggtgaccgtacc

SEQ ID NO: 477 - DNA, 13 bp, synthetic construct
  misc_feature 1..13: note = Description of sequence: Exemplary variable region sequence
  source 1..13: mol_type = other DNA
cgtcaaagacttc

SEQ ID NO: 478 - DNA, 13 bp, synthetic construct
  misc_feature 1..13: note = Description of sequence: Exemplary variable region sequence
  source 1..13: mol_type = other DNA
cgtcgtaagactt

SEQ ID NO: 479 - DNA, 14 bp, synthetic construct
  misc_feature 1..14: note = Description of sequence: Exemplary variable region sequence
  source 1..14: mol_type = other DNA
cgttgaataaacgt

SEQ ID NO: 480-486 - skipped (7 entries)

SEQ ID NO: 487 - DNA, 15 bp, synthetic construct
  misc_feature 1..15: note = Description of sequence: Exemplary variable region sequence
  source 1..15: mol_type = other DNA
tactcgtatgggtgc

SEQ ID NO: 488 - DNA, 13 bp, synthetic construct
  misc_feature 1..13: note = Description of sequence: Exemplary variable region sequence
  source 1..13: mol_type = other DNA
tactttgcggtgt

SEQ ID NO: 489 - DNA, 19 bp, synthetic construct
  misc_feature 1..19: note = Description of sequence: Exemplary variable region sequence
  source 1..19: mol_type = other DNA
taggcgagtaacatcgtgc

SEQ ID NO: 490 - DNA, 19 bp, synthetic construct
  misc_feature 1..19: note = Description of sequence: Exemplary variable region sequence
  source 1..19: mol_type = other DNA
taggcgtgaatagcgcctc

SEQ ID NO: 491 - DNA, 19 bp, synthetic construct
  misc_feature 1..19: note = Description of sequence: Exemplary variable region sequence
  source 1..19: mol_type = other DNA
taggtcgcgagagcggcgc

SEQ ID NO: 492 - DNA, 19 bp, synthetic construct
  misc_feature 1..19: note = Description of sequence: Exemplary variable region sequence
  source 1..19: mol_type = other DNA
taggtcgcgtaagcggcgc

SEQ ID NO: 493 - DNA, 17 bp, synthetic construct
  misc_feature 1..17: note = Description of sequence: Exemplary variable region sequence
  source 1..17: mol_type = other DNA
taggtggttatccacgc

SEQ ID NO: 494-495 - skipped (2 entries)

SEQ ID NO: 496 - DNA, 18 bp, synthetic construct
  misc_feature 1..18: note = Description of sequence: Exemplary variable region sequence
  source 1..18: mol_type = other DNA
tatacgtgaaagcgtatc

SEQ ID NO: 497 - DNA, 21 bp, synthetic construct
  misc_feature 1..21: note = Description of sequence: Exemplary variable region sequence
  source 1..21: mol_type = other DNA
tatagggtcaaaaactctatc

SEQ ID NO: 498 - DNA, 20 bp, synthetic construct
  misc_feature 1..20: note = Description of sequence: Exemplary variable region sequence
  source 1..20: mol_type = other DNA
tatgcagaaatacctgcatc

SEQ ID NO: 499 - DNA, 15 bp, synthetic construct
  misc_feature 1..15: note = Description of sequence: Exemplary variable region sequence
  source 1..15: mol_type = other DNA
tccccatacgggggc

SEQ ID NO: 500 - DNA, 14 bp, synthetic construct
  misc_feature 1..14: note = Description of sequence: Exemplary variable region sequence
  source 1..14: mol_type = other DNA
tcccgaaggggttc

SEQ ID NO: 501 - DNA, 15 bp, synthetic construct
  misc_feature 1..15: note = Description of sequence: Exemplary variable region sequence
  source 1..15: mol_type = other DNA
tctacgtatgtgggc

SEQ ID NO: 502 - DNA, 14 bp, synthetic construct
  misc_feature 1..14: note = Description of sequence: Exemplary variable region sequence
  source 1..14: mol_type = other DNA
tctcataggagttc

SEQ ID NO: 503 - DNA, 14 bp, synthetic construct
  misc_feature 1..14: note = Description of sequence: Exemplary variable region sequence
  source 1..14: mol_type = other DNA
tctcctctggaggc

SEQ ID NO: 504 - DNA, 15 bp, synthetic construct
  misc_feature 1..15: note = Description of sequence: Exemplary variable region sequence
  source 1..15: mol_type = other DNA
tcttagcaataaggt

SEQ ID NO: 505 - DNA, 14 bp, synthetic construct
  misc_feature 1..14: note = Description of sequence: Exemplary variable region sequence
  source 1..14: mol_type = other DNA
tcttgtaggagttc

SEQ ID NO: 506 - DNA, 15 bp, synthetic construct
  misc_feature 1..15: note = Description of sequence: Exemplary variable region sequence
  source 1..15: mol_type = other DNA
tgaacgtaagttcgc

SEQ ID NO: 507 - DNA, 16 bp, synthetic construct
  misc_feature 1..16: note = Description of sequence: Exemplary variable region sequence
  source 1..16: mol_type = other DNA
tgaactgcgaggttcc

SEQ ID NO: 508 - skipped

SEQ ID NO: 509 - DNA, 15 bp, synthetic construct
  misc_feature 1..15: note = Description of sequence: Exemplary variable region sequence
  source 1..15: mol_type = other DNA
tgaccgaaaggtcgt

SEQ ID NO: 510 - DNA, 15 bp, synthetic construct
  misc_feature 1..15: note = Description of sequence: Exemplary variable region sequence
  source 1..15: mol_type = other DNA
tgaccgcaaggtcgt

SEQ ID NO: 511 - DNA, 14 bp, synthetic construct
  misc_feature 1..14: note = Description of sequence: Exemplary variable region sequence
  source 1..14: mol_type = other DNA
tgagctctgctctc

SEQ ID NO: 512 - DNA, 18 bp, synthetic construct
  misc_feature 1..18: note = Description of sequence: Exemplary variable region sequence
  source 1..18: mol_type = other DNA
tgaggcctcacggcctac

SEQ ID NO: 513 - DNA, 15 bp, synthetic construct
  misc_feature 1..15: note = Description of sequence: Exemplary variable region sequence
  source 1..15: mol_type = other DNA
tgagggcaacttcgt

SEQ ID NO: 514 - DNA, 16 bp, synthetic construct
  misc_feature 1..16: note = Description of sequence: Exemplary variable region sequence
  source 1..16: mol_type = other DNA
tgagggtcatacctcc

SEQ ID NO: 515 - DNA, 18 bp, synthetic construct
  misc_feature 1..18: note = Description of sequence: Exemplary variable region sequence
  source 1..18: mol_type = other DNA
tgagggtgcaaatcctcc

SEQ ID NO: 516 - DNA, 13 bp, synthetic construct
  misc_feature 1..13: note = Description of sequence: Exemplary variable region sequence
  source 1..13: mol_type = other DNA
tgccgaaaggcgt

SEQ ID NO: 517 - DNA, 13 bp, synthetic construct
  misc_feature 1..13: note = Description of sequence: Exemplary variable region sequence
  source 1..13: mol_type = other DNA
tgccgtaaggcgt

SEQ ID NO: 518 - DNA, 14 bp, synthetic construct
  misc_feature 1..14: note = Description of sequence: Exemplary variable region sequence
  source 1..14: mol_type = other DNA
tgcggtctccgcgc

SEQ ID NO: 519 - DNA, 11 bp, synthetic construct
  misc_feature 1..11: note = Description of sequence: Exemplary variable region sequence
  source 1..11: mol_type = other DNA
tgctagagcat

SEQ ID NO: 520 - DNA, 16 bp, synthetic construct
  misc_feature 1..16: note = Description of sequence: Exemplary variable region sequence
  source 1..16: mol_type = other DNA
tgctcgtatagagctc

SEQ ID NO: 521 - DNA, 15 bp, synthetic construct
  misc_feature 1..15: note = Description of sequence: Exemplary variable region sequence
  source 1..15: mol_type = other DNA
tggacaattgtctgc

SEQ ID NO: 522 - DNA, 15 bp, synthetic construct
  misc_feature 1..15: note = Description of sequence: Exemplary variable region sequence
  source 1..15: mol_type = other DNA
tggacagatgtccgt

SEQ ID NO: 523 - DNA, 15 bp, synthetic construct
  misc_feature 1..15: note = Description of sequence: Exemplary variable region sequence
  source 1..15: mol_type = other DNA
tggacaggtgtccgc

SEQ ID NO: 524 - DNA, 15 bp, synthetic construct
  misc_feature 1..15: note = Description of sequence: Exemplary variable region sequence
  source 1..15: mol_type = other DNA
tggacggttgtccgc

SEQ ID NO: 525 - DNA, 13 bp, synthetic construct
  misc_feature 1..13: note = Description of sequence: Exemplary variable region sequence
  source 1..13: mol_type = other DNA
tggacttgtggtc

SEQ ID NO: 526 - DNA, 16 bp, synthetic construct
  misc_feature 1..16: note = Description of sequence: Exemplary variable region sequence
  source 1..16: mol_type = other DNA
tggagattctctccgc

SEQ ID NO: 527 - DNA, 14 bp, synthetic construct
  misc_feature 1..14: note = Description of sequence: Exemplary variable region sequence
  source 1..14: mol_type = other DNA
tggcataggcctgc

SEQ ID NO: 528 - DNA, 14 bp, synthetic construct
  misc_feature 1..14: note = Description of sequence: Exemplary variable region sequence
  source 1..14: mol_type = other DNA
tggcttatgtctac

SEQ ID NO: 529 - DNA, 16 bp, synthetic construct
  misc_feature 1..16: note = Description of sequence: Exemplary variable region sequence
  source 1..16: mol_type = other DNA
tgggagttaatcccgt

SEQ ID NO: 530 - DNA, 14 bp, synthetic construct
  misc_feature 1..14: note = Description of sequence: Exemplary variable region sequence
  source 1..14: mol_type = other DNA
tgggatcttcccgc

SEQ ID NO: 531 - DNA, 16 bp, synthetic construct
  misc_feature 1..16: note = Description of sequence: Exemplary variable region sequence
  source 1..16: mol_type = other DNA
tgggcagaaatgtctc

SEQ ID NO: 532 - DNA, 15 bp, synthetic construct
  misc_feature 1..15: note = Description of sequence: Exemplary variable region sequence
  source 1..15: mol_type = other DNA
tgggcgttcgcccgc

SEQ ID NO: 533 - DNA, 14 bp, synthetic construct
  misc_feature 1..14: note = Description of sequence: Exemplary variable region sequence
  source 1..14: mol_type = other DNA
tgggcttcgcccgc

SEQ ID NO: 534 - DNA, 16 bp, synthetic construct
  misc_feature 1..16: note = Description of sequence: Exemplary variable region sequence
  source 1..16: mol_type = other DNA
tgggggataaccccgt

SEQ ID NO: 535 - DNA, 15 bp, synthetic construct
  misc_feature 1..15: note = Description of sequence: Exemplary variable region sequence
  source 1..15: mol_type = other DNA
tgggggtttccccgt

SEQ ID NO: 536 - skipped

SEQ ID NO: 537 - DNA, 15 bp, synthetic construct
  misc_feature 1..15: note = Description of sequence: Exemplary variable region sequence
  source 1..15: mol_type = other DNA
tggtggcaacaccgt

SEQ ID NO: 538 - DNA, 14 bp, synthetic construct
  misc_feature 1..14: note = Description of sequence: Exemplary variable region sequence
  source 1..14: mol_type = other DNA
tggtttatagccgt

SEQ ID NO: 539 - DNA, 19 bp, synthetic construct
  misc_feature 1..19: note = Description of sequence: Exemplary variable region sequence
  source 1..19: mol_type = other DNA
tgtacggtaataccgtacc

SEQ ID NO: 540 - DNA, 15 bp, synthetic construct
  misc_feature 1..15: note = Description of sequence: Exemplary variable region sequence
  source 1..15: mol_type = other DNA
tgtccgcaaggacgt

SEQ ID NO: 541 - DNA, 15 bp, synthetic construct
  misc_feature 1..15: note = Description of sequence: Exemplary variable region sequence
  source 1..15: mol_type = other DNA
tgtcctaacggacgt

SEQ ID NO: 542 - DNA, 18 bp, synthetic construct
  misc_feature 1..18: note = Description of sequence: Exemplary variable region sequence
  source 1..18: mol_type = other DNA
tgtcctattaacggacgt

SEQ ID NO: 543 - DNA, 16 bp, synthetic construct
  misc_feature 1..16: note = Description of sequence: Exemplary variable region sequence
  source 1..16: mol_type = other DNA
tgtccttcacgggcgt

SEQ ID NO: 544 - DNA, 13 bp, synthetic construct
  misc_feature 1..13: note = Description of sequence: Exemplary variable region sequence
  source 1..13: mol_type = other DNA
tgtcttaggacgt

SEQ ID NO: 545 - DNA, 18 bp, synthetic construct
  misc_feature 1..18: note = Description of sequence: Exemplary variable region sequence
  source 1..18: mol_type = other DNA
tgtgcgttaacgcgtacc

SEQ ID NO: 546 - DNA, 16 bp, synthetic construct
  misc_feature 1..16: note = Description of sequence: Exemplary variable region sequence
  source 1..16: mol_type = other DNA
tgtgtcgcaaggcacc

SEQ ID NO: 547 - DNA, 15 bp, synthetic construct
  misc_feature 1..15: note = Description of sequence: Exemplary variable region sequence
  source 1..15: mol_type = other DNA
tgttcgtaaggactt

SEQ ID NO: 548 - DNA, 16 bp, synthetic construct
  misc_feature 1..16: note = Description of sequence: Exemplary variable region sequence
  source 1..16: mol_type = other DNA
ttcacagaaatgtgtc

SEQ ID NO: 549 - DNA, 14 bp, synthetic construct
  misc_feature 1..14: note = Description of sequence: Exemplary variable region sequence
  source 1..14: mol_type = other DNA
ttccctcgtggagt

SEQ ID NO: 550 - DNA, 14 bp, synthetic construct
  misc_feature 1..14: note = Description of sequence: Exemplary variable region sequence
  source 1..14: mol_type = other DNA
ttccctctgggagc

SEQ ID NO: 551 - DNA, 14 bp, synthetic construct
  misc_feature 1..14: note = Description of sequence: Exemplary variable region sequence
  source 1..14: mol_type = other DNA
ttcccttgtggatc

SEQ ID NO: 552 - DNA, 13 bp, synthetic construct
  misc_feature 1..13: note = Description of sequence: Exemplary variable region sequence
  source 1..13: mol_type = other DNA
ttccttcgggagc

SEQ ID NO: 553 - DNA, 15 bp, synthetic construct
  misc_feature 1..15: note = Description of sequence: Exemplary variable region sequence
  source 1..15: mol_type = other DNA
ttctagcaatagagt

SEQ ID NO: 554 - DNA, 16 bp, synthetic construct
  misc_feature 1..16: note = Description of sequence: Exemplary variable region sequence
  source 1..16: mol_type = other DNA
ttctccactggggagc

SEQ ID NO: 555 - DNA, 15 bp, synthetic construct
  misc_feature 1..15: note = Description of sequence: Exemplary variable region sequence
  source 1..15: mol_type = other DNA
ttctcgagagggagc

SEQ ID NO: 556 - DNA, 15 bp, synthetic construct
  misc_feature 1..15: note = Description of sequence: Exemplary variable region sequence
  source 1..15: mol_type = other DNA
ttctcgtatgagagc

SEQ ID NO: 557 - DNA, 19 bp, synthetic construct
  misc_feature 1..19: note = Description of sequence: Exemplary variable region sequence
  source 1..19: mol_type = other DNA
tttaaggttttcccttaac

SEQ ID NO: 558 - DNA, 14 bp, synthetic construct
  misc_feature 1..14: note = Description of sequence: Exemplary variable region sequence
  source 1..14: mol_type = other DNA
tttcattgtggagt

SEQ ID NO: 559 - DNA, 14 bp, synthetic construct
  misc_feature 1..14: note = Description of sequence: Exemplary variable region sequence
  source 1..14: mol_type = other DNA
tttcgaaggaatcc

SEQ ID NO: 560 - DNA, 13 bp, synthetic construct
  misc_feature 1..13: note = Description of sequence: Exemplary variable region sequence
  source 1..13: mol_type = other DNA
tttcttcggaagc

SEQ ID NO: 561 - DNA, 16 bp, synthetic construct
  misc_feature 1..16: note = Description of sequence: Exemplary variable region sequence
  source 1..16: mol_type = other DNA
tttggggcaactcaac

SEQ ID NO: 562-624 - skipped (63 entries)

SEQ ID NO: 625 - RNA, 76 nt, synthetic construct
  misc_feature 1..76: note = Description of sequence: tRNA-based effector molecule
  source 1..76: mol_type = other RNA
acacgcgtggcgcaatggatagcgcattggacttcaaattcaaaggttccgggttcgagtcccggcgcgtgtgcca

SEQ ID NO: 626 - RNA, 76 nt, synthetic construct
  misc_feature 1..76: note = Description of sequence: tRNA-based effector molecule
  source 1..76: mol_type = other RNA
acatacgtggcgcaatggatagcgcattggacttcaaattcaaaggttccgggttcgagtcccggcgtatgtgcca

SEQ ID NO: 627 - RNA, 76 nt, synthetic construct
  misc_feature 1..76: note = Description of sequence: tRNA-based effector molecule
  source 1..76: mol_type = other RNA
accaacgtggcgcaatggatagcgcattggacttcaaattcaaaggttccgggttcgagtcccggcgttggtgcca

SEQ ID NO: 628 - RNA, 76 nt, synthetic construct
  misc_feature 1..76: note = Description of sequence: tRNA-based effector molecule
  source 1..76: mol_type = other RNA
acctccgtggcgcaatggatagcgcattggacttcaaattcaaaggttccgggttcgagtcccggcggaggtgcca

SEQ ID NO: 629 - RNA, 76 nt, synthetic construct
  misc_feature 1..76: note = Description of sequence: tRNA-based effector molecule
  source 1..76: mol_type = other RNA
agggccgtggcgcaatggatagcgcattggacttcaaattcaaaggttccgggttcgagtcccggcggccctgcca

SEQ ID NO: 630 - RNA, 76 nt, synthetic construct
  misc_feature 1..76: note = Description of sequence: tRNA-based effector molecule
  source 1..76: mol_type = other RNA
ataagcgtggcgcaatggatagcgcattggacttcaaattcaaaggttccgggttcgagtcccggcgcttatgcca

SEQ ID NO: 631 - RNA, 76 nt, synthetic construct
  misc_feature 1..76: note = Description of sequence: tRNA-based effector molecule
  source 1..76: mol_type = other RNA
cctcgcgtggcgcaatggatagcgcattggacttcaaattcaaaggttccgggttcgagtcccggcgcgagggcca

SEQ ID NO: 632 - RNA, 76 nt, synthetic construct
  misc_feature 1..76: note = Description of sequence: tRNA-based effector molecule
  source 1..76: mol_type = other RNA
cgccccgtggcgcaatggatagcgcattggacttcaaattcaaaggttccgggttcgagtcccggcggggtggcca

SEQ ID NO: 633 - RNA, 76 nt, synthetic construct
  misc_feature 1..76: note = Description of sequence: tRNA-based effector molecule
  source 1..76: mol_type = other RNA
cgcgccgtggcgcaatggatagcgcattggacttcaaattcaaaggttccgggttcgagtcccggcggcgtggcca

SEQ ID NO: 634 - RNA, 76 nt, synthetic construct
  misc_feature 1..76: note = Description of sequence: tRNA-based effector molecule
  source 1..76: mol_type = other RNA
gaaaaggtggcgcaatggatagcgcattggacttcaaattcaaaggttccgggttcgagtcccggccttttcgcca

SEQ ID NO: 635 - RNA, 76 nt, synthetic construct
  misc_feature 1..76: note = Description of sequence: tRNA-based effector molecule
  source 1..76: mol_type = other RNA
gactccgtggcgcaatggatagcgcatgggacttcaaattccaaggttccgggttcgagtcccggcggagtcgcca

SEQ ID NO: 636 - RNA, 76 nt, synthetic construct
  misc_feature 1..76: note = Description of sequence: tRNA-based effector molecule
  source 1..76: mol_type = other RNA
gactccgtggcgcaatggatagcgcattggtcttcaaaatcaaaggttccgggttcgagtcccggcggagtcgcca

SEQ ID NO: 637 - RNA, 76 nt, synthetic construct
  misc_feature 1..76: note = Description of sequence: tRNA-based effector molecule
  source 1..76: mol_type = other RNA
gagcacgtggcgcaatggatagcgcattggacttcaaattcaaaggttccgggttcgagtcccggcgtgctcgcca

SEQ ID NO: 638 - RNA, 76 nt, synthetic construct
  misc_feature 1..76: note = Description of sequence: tRNA-based effector molecule
  source 1..76: mol_type = other RNA
gatagagtggcgcaatggatagcgcattggacttcaaattcaaaggttccgggttcgagtcccggctctatcgcca

SEQ ID NO: 639 - RNA, 76 nt, synthetic construct
  misc_feature 1..76: note = Description of sequence: tRNA-based effector molecule
  source 1..76: mol_type = other RNA
gcccgagtggcgcaatggatagcgcattggacttcaaattcaaaggttccgggttcgagtcccggctcgggcgcca

SEQ ID NO: 640 - RNA, 76 nt, synthetic construct
  misc_feature 1..76: note = Description of sequence: tRNA-based effector molecule
  source 1..76: mol_type = other RNA
gcctccgtggcgcaatggacagcgcattggacttcaaattcaaaggttccgggttcgagtcccggcggaggcgcca

SEQ ID NO: 641 - RNA, 76 nt, synthetic construct
  misc_feature 1..76: note = Description of sequence: tRNA-based effector molecule
  source 1..76: mol_type = other RNA
gcctccgtggcgcaatggatagcgcagtggacttcaaattcacaggttccgggttcgagtcccggcggaggcgcca

SEQ ID NO: 642 - RNA, 76 nt, synthetic construct
  misc_feature 1..76: note = Description of sequence: tRNA-based effector molecule
  source 1..76: mol_type = other RNA
gcctccgtggcgcaatggatagcgcattggacttcaaattcaaaggttccgggttcgagccccggcggaggcgcca

SEQ ID NO: 643 - RNA, 76 nt, synthetic construct
  misc_feature 1..76: note = Description of sequence: tRNA-based effector molecule
  source 1..76: mol_type = other RNA
gcctccgtggcgcaatggatagcgcattggacttcaaattcaaaggttccgggttcgagtcccggcggaggcccca

SEQ ID NO: 644 - RNA, 76 nt, synthetic construct
  misc_feature 1..76: note = Description of sequence: tRNA-based effector molecule
  source 1..76: mol_type = other RNA
gcctccgtggcgcaatggatagcgcattggacttcaaattcaatggttccgggttcgagtcccggcggaggcgcca

SEQ ID NO: 645 - RNA, 76 nt, synthetic construct
  misc_feature 1..76: note = Description of sequence: tRNA-based effector molecule
  source 1..76: mol_type = other RNA
gcgtgtgtggcgcaatggatagcgcattggacttcaaattcaaaggttccgggttcgagtcccggcacacgcgcca

SEQ ID NO: 646 - RNA, 76 nt, synthetic construct
  misc_feature 1..76: note = Description of sequence: tRNA-based effector molecule
  source 1..76: mol_type = other RNA
ggagcactggcgcaatggatagcgcattggacttcaaattcaaaggttccgggttcgagtcccgggtgcttcgcca

SEQ ID NO: 647 - RNA, 76 nt, synthetic construct
  misc_feature 1..76: note = Description of sequence: tRNA-based effector molecule
  source 1..76: mol_type = other RNA
ggcacagtggcgcaatggatagcgcattggacttcaaattcaaaggttgcgggttcgagtcccgcctgtgtcgcca

SEQ ID NO: 648 - RNA, 76 nt, synthetic construct
  misc_feature 1..76: note = Description of sequence: tRNA-based effector molecule
  source 1..76: mol_type = other RNA
ggcacgttggcgcaatggatagcgcattggacttcaaattcaaaggttacgggttcgagtcccgtacgtgtcgcca

SEQ ID NO: 649 - RNA, 76 nt, synthetic construct
  misc_feature 1..76: note = Description of sequence: tRNA-based effector molecule
  source 1..76: mol_type = other RNA
ggcatcgtggcgcaatggatagcgcattggacttcaaattcaaaggttccgggttcgagtcccggcgatgtcgcca

SEQ ID NO: 650 - RNA, 76 nt, synthetic construct
  misc_feature 1..76: note = Description of sequence: tRNA-based effector molecule
  source 1..76: mol_type = other RNA
ggccaactggcgcaatggatagcgcattggacttcaaattcaaaggttacgggttcgagtcccgtgttggtcgcca

SEQ ID NO: 651 - RNA, 76 nt, synthetic construct
  misc_feature 1..76: note = Description of sequence: tRNA-based effector molecule
  source 1..76: mol_type = other RNA
ggcccagtggcgcaatggatagcgcattggacttcaaattcaaaggttgcgggttcgagtcccgcctgggtcgcca

SEQ ID NO: 652 - RNA, 76 nt, synthetic construct
  misc_feature 1..76: note = Description of sequence: tRNA-based effector molecule
  source 1..76: mol_type = other RNA
ggccccatggcgcaatggatagcgcattggacttcaaattcaaaggttccgggttcgagtcccggtggggtcgcca

SEQ ID NO: 653 - RNA, 76 nt, synthetic construct
  misc_feature 1..76: note = Description of sequence: tRNA-based effector molecule
  source 1..76: mol_type = other RNA
ggccccgtggcgcaatggatagcgcagtggacttcaaattcacaggttccgggttcgagtcccggcggagtcgcca

SEQ ID NO: 654 - RNA, 76 nt, synthetic construct
  misc_feature 1..76: note = Description of sequence: tRNA-based effector molecule
  source 1..76: mol_type = other RNA
ggccccgtggcgcaatggatagcgcattggacttcaaattcaaaggttccgggttcgaatcccggcggggtcgcca

SEQ ID NO: 655 - RNA, 76 nt, synthetic construct
  misc_feature 1..76: note = Description of sequence: tRNA-based effector molecule
  source 1..76: mol_type = other RNA
ggcccgatggcgcaatggatagcgcattggacttcaaattcaaaggttgcgggttcgagtcccgctcgggtcgcca

SEQ ID NO: 656 - RNA, 76 nt, synthetic construct
  misc_feature 1..76: note = Description of sequence: tRNA-based effector molecule
  source 1..76: mol_type = other RNA
ggcccgatggcgcaatggatagcgcattggacttcaaattcaaaggtttcgggttcgagtcccgatcgggtcgcca

SEQ ID NO: 657 - RNA, 76 nt, synthetic construct
  misc_feature 1..76: note = Description of sequence: tRNA-based effector molecule
  source 1..76: mol_type = other RNA
ggccctgtggcgcaatggatagcgcattggacttcaaattcaaaggttccgggttcgagtcccggcggggtcgcca

SEQ ID NO: 658 - RNA, 76 nt, synthetic construct
  misc_feature 1..76: note = Description of sequence: tRNA-based effector molecule
  source 1..76: mol_type = other RNA
ggccgactggcgcaatggatagcgcattggacttcaaattcaaaggttacgggttcgagtcccgtgtcggtcgcca

SEQ ID NO: 659 - RNA, 76 nt, synthetic construct
  misc_feature 1..76: note = Description of sequence: tRNA-based effector molecule
  source 1..76: mol_type = other RNA
ggcgccatggcgcaatggatagcgcattggacttcaaattcaaaggttccgggttcgagtcccggtggcgtcgcca

SEQ ID NO: 660 - RNA, 76 nt, synthetic construct
  misc_feature 1..76: note = Description of sequence: tRNA-based effector molecule
  source 1..76: mol_type = other RNA
ggcgccgtggcgcaatggacagcgcattggacttcaaattcaaaggttccgggttcgagtcccggcggcgtcgcca

SEQ ID NO: 661 - RNA, 76 nt, synthetic construct
  misc_feature 1..76: note = Description of sequence: tRNA-based effector molecule
  source 1..76: mol_type = other RNA
ggcgccgtggcgcaatggagagcgcattggacttcaaattcaaaggttccgggttcgagtcccggcggcgtcgcca

SEQ ID NO: 662 - RNA, 76 nt, synthetic construct
  misc_feature 1..76: note = Description of sequence: tRNA-based effector molecule
  source 1..76: mol_type = other RNA
ggcgccgtggcgcaatggatagcgcattcgacttcaaattgaaaggttccgggttcgagtcccggcggcgtcgcca

SEQ ID NO: 663 - RNA, 76 nt, synthetic construct
  misc_feature 1..76: note = Description of sequence: tRNA-based effector molecule
  source 1..76: mol_type = other RNA
ggcgccgtggcgcaatggatagcgcattggacttcaaattcaaaggatccgggttcgagtcccggcggcgtcgcca

SEQ ID NO: 664 - RNA, 76 nt, synthetic construct
  misc_feature 1..76: note = Description of sequence: tRNA-based effector molecule
  source 1..76: mol_type = other RNA
ggcgccgtggcgcaatggatagcgcattggacttcaaattcaaaggttccgagttcgagtctcggcggcgtcgcca

SEQ ID NO: 665 - RNA, 76 nt, synthetic construct
  misc_feature 1..76: note = Description of sequence: tRNA-based effector molecule
  source 1..76: mol_type = other RNA
ggcgccgtggcgcaatggatagcgctttggacttcaaattcaaaggttccgggttcgagtcccggcggcgtcgcca

SEQ ID NO: 666 - RNA, 76 nt, synthetic construct
  misc_feature 1..76: note = Description of sequence: tRNA-based effector molecule
  source 1..76: mol_type = other RNA
ggcggactggcgcaatggatagcgcattggacttcaaattcaaaggttacgggttcgagtcccgtgtccgtcgcca

SEQ ID NO: 667 - RNA, 76 nt, synthetic construct
  misc_feature 1..76: note = Description of sequence: tRNA-based effector molecule
  source 1..76: mol_type = other RNA
ggcggattggcgcaatggatagcgcattggacttcaaattcaaaggttacgggttcgagtcccgtatccgtcgcca

SEQ ID NO: 668 - RNA, 76 nt, synthetic construct
  misc_feature 1..76: note = Description of sequence: tRNA-based effector molecule
  source 1..76: mol_type = other RNA
ggctacctggcgcaatggatagcgcattggacttcaaattcaaaggttcggggttcgagtccccgggtagtcgcca

SEQ ID NO: 669 - RNA, 76 nt, synthetic construct
  misc_feature 1..76: note = Description of sequence: tRNA-based effector molecule
  source 1..76: mol_type = other RNA
ggctacgtggcgcaatggatagcgcataggacttcaaattctaaggttccgggttcgagtcccggcgtagtcgcca

SEQ ID NO: 670 - RNA, 76 nt, synthetic construct
  misc_feature 1..76: note = Description of sequence: tRNA-based effector molecule
  source 1..76: mol_type = other RNA
ggctacgtggcgcaatggatagcgcattggacttcaaattcaaaggttgtgggttcgagtcccaccgtagtcgcca

SEQ ID NO: 671 - RNA, 76 nt, synthetic construct
  misc_feature 1..76: note = Description of sequence: tRNA-based effector molecule
  source 1..76: mol_type = other RNA
ggctcactggcgcaatggatagcgcattggacttcaaattcaaaggttagtggttcgagtccactgtgagtcgcca

SEQ ID NO: 672 - RNA, 76 nt, synthetic construct
  misc_feature 1..76: note = Description of sequence: tRNA-based effector molecule
  source 1..76: mol_type = other RNA
ggctcagtggcgcaatggatagcgcatcggacttcaaattcgaaggttccgggttcgagtcccggctgagtcgcca

SEQ ID NO: 673 - RNA, 76 nt, synthetic construct
  misc_feature 1..76: note = Description of sequence: tRNA-based effector molecule
  source 1..76: mol_type = other RNA
ggctcagtggcgcaatggatagcgctttggacttcaaattcaaaggttccgggttcgagtcccggctgagtcgcca

SEQ ID NO: 674 - RNA, 76 nt, synthetic construct
  misc_feature 1..76: note = Description of sequence: tRNA-based effector molecule
  source 1..76: mol_type = other RNA
ggctcatccacgcaatggatagcgtattggacttcaaattcaaaggttccgggttcgagtcccggatgagtcgcca

SEQ ID NO: 675 - RNA, 76 nt, synthetic construct
  misc_feature 1..76: note = Description of sequence: tRNA-based effector molecule
  source 1..76: mol_type = other RNA
ggctccatggcgcaatggatagcgcattggacttcaaattcaaaggttactggttcgagtccagttggagtcgcca

SEQ ID NO: 676 - RNA, 76 nt, synthetic construct
  misc_feature 1..76: note = Description of sequence: tRNA-based effector molecule
  source 1..76: mol_type = other RNA
ggctcccctgagcaatggatagctcattggacttcaaattcaaaggttccgggttcgagtcccgggggagtcgcca

SEQ ID NO: 677 - RNA, 76 nt, synthetic construct
  misc_feature 1..76: note = Description of sequence: tRNA-based effector molecule
  source 1..76: mol_type = other RNA
ggctccctggcgcaatggaaagcgcattggacttcaaattcaaaggttccgggttcgagtcccgggggagtcgcca

SEQ ID NO: 678 - RNA, 76 nt, synthetic construct
  misc_feature 1..76: note = Description of sequence: tRNA-based effector molecule
  source 1..76: mol_type = other RNA
ggctccctggcgcaatggacagcgcattggacttcaaattcaaaggttccgggttcgagtcccgggggagtcgcca

SEQ ID NO: 679 - RNA, 76 nt, synthetic construct
  misc_feature 1..76: note = Description of sequence: tRNA-based effector molecule
  source 1..76: mol_type = other RNA
ggctccctggcgcaatggagagcgcattggacttcaaattcaaaggttccgggttcgagtcccgggggagtcgcca

SEQ ID NO: 680 - RNA, 76 nt, synthetic construct
  misc_feature 1..76: note = Description of sequence: tRNA-based effector molecule
  source 1..76: mol_type = other RNA
ggctccctggcgcaatggatagcgcattggacttcaaattcaaaggttccgggttcgagtcccgggggggtcgcca

SEQ ID NO: 681 - RNA, 76 nt, synthetic construct
  misc_feature 1..76: note = Description of sequence: tRNA-based effector molecule
  source 1..76: mol_type = other RNA
ggctccgaggcggaatggataccgcattggacttcaaattcaaaggttccgggttcgagtcccggcggagtcgcca

SEQ ID NO: 682 - RNA, 76 nt, synthetic construct
  misc_feature 1..76: note = Description of sequence: tRNA-based effector molecule
  source 1..76: mol_type = other RNA
ggctccgtgaaataatggatcatttattggacttcaaattcaaaggttccgggttcgagtcccggcggagtcgcca

SEQ ID NO: 683 - RNA, 76 nt, synthetic construct
  misc_feature 1..76: note = Description of sequence: tRNA-based effector molecule
  source 1..76: mol_type = other RNA
ggctccgtgacgcaatggatagcgcattggacttcaaattcagaggttccgggttcgagtcccggcggagtcgcca

SEQ ID NO: 684 - RNA, 76 nt, synthetic construct
  misc_feature 1..76: note = Description of sequence: tRNA-based effector molecule
  source 1..76: mol_type = other RNA
ggctccgtgacgcaatggatagcgtattggtcttcaaaatcaaaggttccgggttcgagtcccggcggagtcgcca

SEQ ID NO: 685 - RNA, 76 nt, synthetic construct
  misc_feature 1..76: note = Description of sequence: tRNA-based effector molecule
  source 1..76: mol_type = other RNA
ggctccgtgacgcaatggatagcgtctctgacttcaaattagaaggttccgggttcgagtcccggcggagtcgcca

SEQ ID NO: 686 - RNA, 76 nt, synthetic construct
  misc_feature 1..76: note = Description of sequence: tRNA-based effector molecule
  source 1..76: mol_type = other RNA
ggctccgtggacgaatggagacgtcattggacttcaaattcaaaggttccgggttcgagtcccggcggagtcgcca

SEQ ID NO: 687 - RNA, 76 nt, synthetic construct
  misc_feature 1..76: note = Description of sequence: tRNA-based effector molecule
  source 1..76: mol_type = other RNA
ggctccgtggcaagtcggatattgcattggacttcaaattcaaaggttccgggttcgagtcccggcggagtcgcca

SEQ ID NO: 688 - RNA, 76 nt, synthetic construct
  misc_feature 1..76: note = Description of sequence: tRNA-based effector molecule
  source 1..76: mol_type = other RNA
ggctccgtggccggtgggatacggcattggacttcaaattcaaaggttccgggttcgagtcccggcggagtcgcca

SEQ ID NO: 689 - RNA, 76 nt, synthetic construct
  misc_feature 1..76: note = Description of sequence: tRNA-based effector molecule
  source 1..76: mol_type = other RNA
ggctccgtggcgcaaaattaagcgcattggacttcaaattcaaaggttccgggttcgagtcccggcggagtcgcca

SEQ ID NO: 690 - RNA, 76 nt, synthetic construct
  misc_feature 1..76: note = Description of sequence: tRNA-based effector molecule
  source 1..76: mol_type = other RNA
ggctccgtggcgcaaaggatagcgcatcggacttcaaattcgaaggttccgggttcgagtcccggcggagtcgcca

SEQ ID NO: 691 - RNA, 76 nt, synthetic construct
  misc_feature 1..76: note = Description of sequence: tRNA-based effector molecule
  source 1..76: mol_type = other RNA
ggctccgtggcgcaaaggatagcgcattggacttcaaattcaaaggttccgggttcgagtcccggcggagtcgcca

SEQ ID NO: 692 - RNA, 76 nt, synthetic construct
  misc_feature 1..76: note = Description of sequence: tRNA-based effector molecule
  source 1..76: mol_type = other RNA
ggctccgtggcgcaacggatagcgcatgggacttcaaattccaaggttccgggttcgagtcccggcggagtcgcca

SEQ ID NO: 693 - RNA, 76 nt, synthetic construct
  misc_feature 1..76: note = Description of sequence: tRNA-based effector molecule
  source 1..76: mol_type = other RNA
ggctccgtggcgcaacggatagcgcattggacttcaaattcaaaggttcggggttcgagtccccgcggagtcgcca

SEQ ID NO: 694 - RNA, 76 nt, synthetic construct
  misc_feature 1..76: note = Description of sequence: tRNA-based effector molecule
  source 1..76: mol_type = other RNA
ggctccgtggcgcaatggaaagcgcattggacttcaaattcaaagggtccgggttcgagtcccggcggagtcgcca

SEQ ID NO: 695 - RNA, 76 nt, synthetic construct
  misc_feature 1..76: note = Description of sequence: tRNA-based effector molecule
  source 1..76: mol_type = other RNA
ggctccgtggcgcaatggacagcgcataggacttcaaattctaaggttccgggttcgagtcccggcggagtcgcca

SEQ ID NO: 696 - RNA, 76 nt, synthetic construct
  misc_feature 1..76: note = Description of sequence: tRNA-based effector molecule
  source 1..76: mol_type = other RNA
ggctccgtggcgcaatggacagcgcattggacttcagattcaaaggttccgggttcgagtcccggcggagtcgcca

SEQ ID NO: 697 - RNA, 76 nt, synthetic construct
  misc_feature 1..76: note = Description of sequence: tRNA-based effector molecule
  source 1..76: mol_type = other RNA
ggctccgtggcgcaatggacagcgctttggacttcaaattcaaaggttccgggttcgagtcccggcggagtcgcca

SEQ ID NO: 698 - RNA, 76 nt, synthetic construct
  misc_feature 1..76: note = Description of sequence: tRNA-based effector molecule
  source 1..76: mol_type = other RNA
ggctccgtggcgcaatggagagcgcattggacttcaaattcaaaggttacgggttcgagtcccgtcggagtcgcca

SEQ ID NO: 699 - RNA, 76 nt, synthetic construct
  misc_feature 1..76: note = Description of sequence: tRNA-based effector molecule
  source 1..76: mol_type = other RNA
ggctccgtggcgcaatggagagcgcattggacttcaaattcaaaggttccgggttcgaatcccggcggagtcgcca

SEQ ID NO: 700 - RNA, 76 nt, synthetic construct
  misc_feature 1..76: note = Description of sequence: tRNA-based effector molecule
  source 1..76: mol_type = other RNA
ggctccgtggcgcaatggagagcgcattggacttcaaattcaaaggttcggggttcgagtccccgcggagtcgcca

SEQ ID NO: 701 - RNA, 76 nt, synthetic construct
  misc_feature 1..76: note = Description of sequence: tRNA-based effector molecule
  source 1..76: mol_type = other RNA
ggctccgtggcgcaatggatagcgcaaacatcttcaaaatgttaggttccgggttcgagtcccggcggagtcgcca

SEQ ID NO: 702 - RNA, 76 nt, synthetic construct
  misc_feature 1..76: note = Description of sequence: tRNA-based effector molecule
  source 1..76: mol_type = other RNA
ggctccgtggcgcaatggatagcgcaaccgtcttcaaaacggtaggttccgggttcgagtcccggcggagtcgcca

SEQ ID NO: 703 - RNA, 76 nt, synthetic construct
  misc_feature 1..76: note = Description of sequence: tRNA-based effector molecule
  source 1..76: mol_type = other RNA
ggctccgtggcgcaatggatagcgcaatgggcttcaaactcataggttccgggttcgagtcccggcggagtcgcca

SEQ ID NO: 704 - RNA, 76 nt, synthetic construct
  misc_feature 1..76: note = Description of sequence: tRNA-based effector molecule
  source 1..76: mol_type = other RNA
ggctccgtggcgcaatggatagcgcaccggacttcaaattcggaggttccgggttcgagtcccggcggagtcgcca

SEQ ID NO: 705 - RNA, 76 nt, synthetic construct
  misc_feature 1..76: note = Description of sequence: tRNA-based effector molecule
  source 1..76: mol_type = other RNA
ggctccgtggcgcaatggatagcgcactggtcttcaaaatcagaggttccgggttcgagtcccggcggagtcgcca

SEQ ID NO: 706 - RNA, 76 nt, synthetic construct
  misc_feature 1..76: note = Description of sequence: tRNA-based effector molecule
  source 1..76: mol_type = other RNA
ggctccgtggcgcaatggatagcgcagtcgacttcaaattgacaggttccgggttcgagtcccggcggagtcgcca

SEQ ID NO: 707 - RNA, 76 nt, synthetic construct
  misc_feature 1..76: note = Description of sequence: tRNA-based effector molecule
  source 1..76: mol_type = other RNA
ggctccgtggcgcaatggatagcgcagtggacttcaaattcactccgtccgggttcgagtcccggcggagtcgcca

SEQ ID NO: 708 - RNA, 76 nt, synthetic construct
  misc_feature 1..76: note = Description of sequence: tRNA-based effector molecule
  source 1..76: mol_type = other RNA
ggctccgtggcgcaatggatagcgcatacagcttcaaactgtaaggttccgggttcgagtcccggcggagtcgcca

SEQ ID NO: 709 - RNA, 76 nt, synthetic construct
  misc_feature 1..76: note = Description of sequence: tRNA-based effector molecule
  source 1..76: mol_type = other RNA
ggctccgtggcgcaatggatagcgcatatgacttcaattcataaggttccgggttcgagtcccggcggagtcgcca

SEQ ID NO: 710 - RNA, 76 nt, synthetic construct
  misc_feature 1..76: note = Description of sequence: tRNA-based effector molecule
  source 1..76: mol_type = other RNA
ggctccgtggcgcaatggatagcgcatcggtcttcaaaatcgaaggttccgggttcgagtcccggcggagtcgcca

SEQ ID NO: 711 - RNA, 76 nt, synthetic construct
  misc_feature 1..76: note = Description of sequence: tRNA-based effector molecule
  source 1..76: mol_type = other RNA
ggctccgtggcgcaatggatagcgcatgggacttcaaattccatggttccgggttcgagtcccggcggagtcgcca

SEQ ID NO: 712 - RNA, 76 nt, synthetic construct
  misc_feature 1..76: note = Description of sequence: tRNA-based effector molecule
  source 1..76: mol_type = other RNA
ggctccgtggcgcaatggatagcgcatgtgacttcaaattacacggttccgggttcgagtcccggcggagtcgcca

SEQ ID NO: 713 - RNA, 76 nt, synthetic construct
  misc_feature 1..76: note = Description of sequence: tRNA-based effector molecule
  source 1..76: mol_type = other RNA
ggctccgtggcgcaatggatagcgcattcactttcaaagtgaaaggttccgggttcgagtcccggcggagtcgcca

SEQ ID NO: 714 - RNA, 76 nt, synthetic construct
  misc_feature 1..76: note = Description of sequence: tRNA-based effector molecule
  source 1..76: mol_type = other RNA
ggctccgtggcgcaatggatagcgcattcgacttcagattgaaaggttccgggttcgagtcccggcggagtcgcca

SEQ ID NO: 715 - RNA, 76 nt, synthetic construct
  misc_feature 1..76: note = Description of sequence: tRNA-based effector molecule
  source 1..76: mol_type = other RNA
ggctccgtggcgcaatggatagcgcattggactgattattcaaaggttccgggttcgagtcccggcggagtcgcca

SEQ ID NO: 716 - RNA, 76 nt, synthetic construct
  misc_feature 1..76: note = Description of sequence: tRNA-based effector molecule
  source 1..76: mol_type = other RNA
ggctccgtggcgcaatggatagcgcattggacttcaaaagcaaaggttccgggttcgagtcccggcggagtcgcca

SEQ ID NO: 717 - RNA, 76 nt, synthetic construct
  misc_feature 1..76: note = Description of sequence: tRNA-based effector molecule
  source 1..76: mol_type = other RNA
ggctccgtggcgcaatggatagcgcattggacttcaaattcaaacacttcgggttcgagtcccgacggagtcgcca

SEQ ID NO: 718 - RNA, 76 nt, synthetic construct
  misc_feature 1..76: note = Description of sequence: tRNA-based effector molecule
  source 1..76: mol_type = other RNA
ggctccgtggcgcaatggatagcgcattggacttcaaattcaaagatcaagggttcgagtcccttcggagtcgcca

SEQ ID NO: 719 - RNA, 76 nt, synthetic construct
  misc_feature 1..76: note = Description of sequence: tRNA-based effector molecule
  source 1..76: mol_type = other RNA
ggctccgtggcgcaatggatagcgcattggacttcaaattcaaaggcagccggttcgagtccggccggagtcgcca

SEQ ID NO: 720 - RNA, 76 nt, synthetic construct
  misc_feature 1..76: note = Description of sequence: tRNA-based effector molecule
  source 1..76: mol_type = other RNA
ggctccgtggcgcaatggatagcgcattggacttcaaattcaaaggctccgggttcgagtcccggcggagtcacca

SEQ ID NO: 721 - RNA, 76 nt, synthetic construct
  misc_feature 1..76: note = Description of sequence: tRNA-based effector molecule
  source 1..76: mol_type = other RNA
ggctccgtggcgcaatggatagcgcattggacttcaaattcaaaggctccgggttcgagtcccggcggagtcgcca

SEQ ID NO: 722 - RNA, 76 nt, synthetic construct
  misc_feature 1..76: note = Description of sequence: tRNA-based effector molecule
  source 1..76: mol_type = other RNA
ggctccgtggcgcaatggatagcgcattggacttcaaattcaaagggctgtggttcgagtccacacggagtcgcca

SEQ ID NO: 723 - RNA, 76 nt, synthetic construct
  misc_feature 1..76: note = Description of sequence: tRNA-based effector molecule
  source 1..76: mol_type = other RNA
ggctccgtggcgcaatggatagcgcattggacttcaaattcaaaggttaagatttcgagtatcttcggagtcgcca

SEQ ID NO: 724 - RNA, 76 nt, synthetic construct
  misc_feature 1..76: note = Description of sequence: tRNA-based effector molecule
  source 1..76: mol_type = other RNA
ggctccgtggcgcaatggatagcgcattggacttcaaattcaaaggttacgggttcgagtcccgtcggagccgcca

SEQ ID NO: 725 - RNA, 76 nt, synthetic construct
  misc_feature 1..76: note = Description of sequence: tRNA-based effector molecule
  source 1..76: mol_type = other RNA
ggctccgtggcgcaatggatagcgcattggacttcaaattcaaaggttccagtcacgagtactggcggagtcgcca

SEQ ID NO: 726 - RNA, 76 nt, synthetic construct
  misc_feature 1..76: note = Description of sequence: tRNA-based effector molecule
  source 1..76: mol_type = other RNA
ggctccgtggcgcaatggatagcgcattggacttcaaattcaaaggttccgaaacggagtttcggcggagtcgcca

SEQ ID NO: 727 - RNA, 76 nt, synthetic construct
  misc_feature 1..76: note = Description of sequence: tRNA-based effector molecule
  source 1..76: mol_type = other RNA
ggctccgtggcgcaatggatagcgcattggacttcaaattcaaaggttccgagttcgggtctcggcggagtcgcca

SEQ ID NO: 728 - RNA, 76 nt, synthetic construct
  misc_feature 1..76: note = Description of sequence: tRNA-based effector molecule
  source 1..76: mol_type = other RNA
ggctccgtggcgcaatggatagcgcattggacttcaaattcaaaggttccggataggagttccggcggagtcgcca

SEQ ID NO: 729 - RNA, 76 nt, synthetic construct
  misc_feature 1..76: note = Description of sequence: tRNA-based effector molecule
  source 1..76: mol_type = other RNA
ggctccgtggcgcaatggatagcgcattggacttcaaattcaaaggttccggattcattttccggcggagtcgcca

SEQ ID NO: 730 - RNA, 76 nt, synthetic construct
  misc_feature 1..76: note = Description of sequence: tRNA-based effector molecule
  source 1..76: mol_type = other RNA
ggctccgtggcgcaatggatagcgcattggacttcaaattcaaaggttccggcgttaagtgccggcggagtcgcca

SEQ ID NO: 731 - RNA, 76 nt, synthetic construct
  misc_feature 1..76: note = Description of sequence: tRNA-based effector molecule
  source 1..76: mol_type = other RNA
ggctccgtggcgcaatggatagcgcattggacttcaaattcaaaggttccgggaacatgtcccggcggagtcgcca

SEQ ID NO: 732 - RNA, 76 nt, synthetic construct
  misc_feature 1..76: note = Description of sequence: tRNA-based effector molecule
  source 1..76: mol_type = other RNA
ggctccgtggcgcaatggatagcgcattggacttcaaattcaaaggttccgggttcatgccccggcggagtcgcca

SEQ ID NO: 733 - RNA, 76 nt, synthetic construct
  misc_feature 1..76: note = Description of sequence: tRNA-based effector molecule
  source 1..76: mol_type = other RNA
ggctccgtggcgcaatggatagcgcattggacttcaaattcaaaggttccgggttcgagtcccggcggagctgcca

SEQ ID NO: 734 - RNA, 76 nt, synthetic construct
  misc_feature 1..76: note = Description of sequence: tRNA-based effector molecule
  source 1..76: mol_type = other RNA
ggctccgtggcgcaatggatagcgcattggacttcaaattcaaaggttccgggttcgagtcccggcggagtcgcca

SEQ ID NO: 735 - RNA, 76 nt, synthetic construct
  misc_feature 1..76: note = Description of sequence: tRNA-based effector molecule
  source 1..76: mol_type = other RNA
ggctccgtggcgcaatggatagcgcattggacttcaaattcaaaggttccgggttgagtacccggcggagtcgcca

SEQ ID NO: 736 - RNA, 76 nt, synthetic construct
  misc_feature 1..76: note = Description of sequence: tRNA-based effector molecule
  source 1..76: mol_type = other RNA
ggctccgtggcgcaatggatagcgcattggacttcaaattcaaaggttccgggttgcaagcccggcggagtcgcca

SEQ ID NO: 737 - RNA, 76 nt, synthetic construct
  misc_feature 1..76: note = Description of sequence: tRNA-based effector molecule
  source 1..76: mol_type = other RNA
ggctccgtggcgcaatggatagcgcattggacttcaaattcaaaggttccggtttcagataccggcggagtcgcca

SEQ ID NO: 738 - RNA, 76 nt, synthetic construct
  misc_feature 1..76: note = Description of sequence: tRNA-based effector molecule
  source 1..76: mol_type = other RNA
ggctccgtggcgcaatggatagcgcattggacttcaaattcaaaggttccgtaaacgagttacggcggagtcgcca

SEQ ID NO: 739 - RNA, 76 nt, synthetic construct
  misc_feature 1..76: note = Description of sequence: tRNA-based effector molecule
  source 1..76: mol_type = other RNA
ggctccgtggcgcaatggatagcgcattggacttcaaattcaaagtccgggggttcgagtccccccggagtcgcca

SEQ ID NO: 740 - RNA, 76 nt, synthetic construct
  misc_feature 1..76: note = Description of sequence: tRNA-based effector molecule
  source 1..76: mol_type = other RNA
ggctccgtggcgcaatggatagcgcattggacttcaaattcaacggttcggggttcgagtccccgcggagtcgcca

SEQ ID NO: 741 - RNA, 76 nt, synthetic construct
  misc_feature 1..76: note = Description of sequence: tRNA-based effector molecule
  source 1..76: mol_type = other RNA
ggctccgtggcgcaatggatagcgcattggacttcaaattcaagggatccgggttcgagtcccggcggagtcgcca

SEQ ID NO: 742 - RNA, 76 nt, synthetic construct
  misc_feature 1..76: note = Description of sequence: tRNA-based effector molecule
  source 1..76: mol_type = other RNA
ggctccgtggcgcaatggatagcgcattggacttcaaattcaagggttcagggttcgagtccctgcggagtcgcca

SEQ ID NO: 743 - RNA, 76 nt, synthetic construct
  misc_feature 1..76: note = Description of sequence: tRNA-based effector molecule
  source 1..76: mol_type = other RNA
ggctccgtggcgcaatggatagcgcattggacttcaaattcaagggttccgggttcgagtcccggcggagtcgcca

SEQ ID NO: 744 - RNA, 76 nt, synthetic construct
  misc_feature 1..76: note = Description of sequence: tRNA-based effector molecule
  source 1..76: mol_type = other RNA
ggctccgtggcgcaatggatagcgcattggacttcaaattcaatggttccgggttcgagtcccggcggagtcgcca

SEQ ID NO: 745 - RNA, 76 nt, synthetic construct
  misc_feature 1..76: note = Description of sequence: tRNA-based effector molecule
  source 1..76: mol_type = other RNA
ggctccgtggcgcaatggatagcgcattggacttcagattcaaaggttccgggttcgattcccggcggagtcgcca

SEQ ID NO: 746 - RNA, 76 nt, synthetic construct
  misc_feature 1..76: note = Description of sequence: tRNA-based effector molecule
  source 1..76: mol_type = other RNA
ggctccgtggcgcaatggatagcgcattggacttcagattcaatggttccgggttcgagtcccggcggagtcgcca

SEQ ID NO: 747 - RNA, 76 nt, synthetic construct
  misc_feature 1..76: note = Description of sequence: tRNA-based effector molecule
  source 1..76: mol_type = other RNA
ggctccgtggcgcaatggatagcgcattggctgtcaaagtcaaaggttccgggttcgagtcccggcggagtcgcca

SEQ ID NO: 748 - RNA, 76 nt, synthetic construct
  misc_feature 1..76: note = Description of sequence: tRNA-based effector molecule
  source 1..76: mol_type = other RNA
ggctccgtggcgcaatggatagcgcattgggcttcaaactcaaaggttccgggttcgagtcccggcggggtcgcca

SEQ ID NO: 749 - RNA, 76 nt, synthetic construct
  misc_feature 1..76: note = Description of sequence: tRNA-based effector molecule
  source 1..76: mol_type = other RNA
ggctccgtggcgcaatggatagcgcattggtcttcaaaatcaaaggctccgggttcgagtcccggcggagtcgcca

SEQ ID NO: 750 - RNA, 76 nt, synthetic construct
  misc_feature 1..76: note = Description of sequence: tRNA-based effector molecule
  source 1..76: mol_type = other RNA
ggctccgtggcgcaatggatagcgcattggtcttcaaaatcaacggttccgggttcgagtcccggcggagtcgcca

SEQ ID NO: 751 - RNA, 76 nt, synthetic construct
  misc_feature 1..76: note = Description of sequence: tRNA-based effector molecule
  source 1..76: mol_type = other RNA
ggctccgtggcgcaatggatagcgcgatgcacttcaaatgcataggttccgggttcgagtcccggcggagtcgcca

SEQ ID NO: 752 - RNA, 76 nt, synthetic construct
  misc_feature 1..76: note = Description of sequence: tRNA-based effector molecule
  source 1..76: mol_type = other RNA
ggctccgtggcgcaatggatagcgcgctggacttcaaattcagaggttccgggttcgagtcccggcggagtcgcca

SEQ ID NO: 753 - RNA, 76 nt, synthetic construct
  misc_feature 1..76: note = Description of sequence: tRNA-based effector molecule
  source 1..76: mol_type = other RNA
ggctccgtggcgcaatggatagcgcggtggacttcaaattcaaaggttccgggttcgagtcccggcggagtcgcca

SEQ ID NO: 754 - RNA, 76 nt, synthetic construct
  misc_feature 1..76: note = Description of sequence: tRNA-based effector molecule
  source 1..76: mol_type = other RNA
ggctccgtggcgcaatggatagcgcgtcggacttcaaattcgaaggttccgggttcgagtcccggcggagtcgcca

SEQ ID NO: 755 - RNA, 76 nt, synthetic construct
  misc_feature 1..76: note = Description of sequence: tRNA-based effector molecule
  source 1..76: mol_type = other RNA
ggctccgtggcgcaatggatagcgcgtctcacttcaaatgagaaggttccgggttcgagtcccggcggagtcgcca

SEQ ID NO: 756 - RNA, 76 nt, synthetic construct
  misc_feature 1..76: note = Description of sequence: tRNA-based effector molecule
  source 1..76: mol_type = other RNA
ggctccgtggcgcaatggatagcgctttggacttcaaattcaaaggttccgggttcgagtcccggcggggtcgcca

SEQ ID NO: 757 - RNA, 76 nt, synthetic construct
  misc_feature 1..76: note = Description of sequence: tRNA-based effector molecule
  source 1..76: mol_type = other RNA
ggctccgtggcgcaatggatagcggattggacttcaaattcaaagtttccgggttcgagtcccggcggagtcgcca

SEQ ID NO: 758 - RNA, 76 nt, synthetic construct
  misc_feature 1..76: note = Description of sequence: tRNA-based effector molecule
  source 1..76: mol_type = other RNA
ggctccgtggcgtaatggataacgcattggacttcaaattcaaaggttccgggttcgagtcccggcggggtcgcca

SEQ ID NO: 759 - RNA, 76 nt, synthetic construct
  misc_feature 1..76: note = Description of sequence: tRNA-based effector molecule
  source 1..76: mol_type = other RNA
ggctccgtggcgtaatggatagcgcattggacttcaaattcaaaggctccgggttcgagtcccggcggagtcgcca

SEQ ID NO: 760 - RNA, 76 nt, synthetic construct
  misc_feature 1..76: note = Description of sequence: tRNA-based effector molecule
  source 1..76: mol_type = other RNA
ggctccgtggctaatcggatatagcattggacttcaaattcaaaggttccgggttcgagtcccggcggagtcgcca

SEQ ID NO: 761 - RNA, 76 nt, synthetic construct
  misc_feature 1..76: note = Description of sequence: tRNA-based effector molecule
  source 1..76: mol_type = other RNA
ggctccgtggtgggatggataccacattggacttcaaattcaaaggttccgggttcgagtcccggcggagtcgcca

SEQ ID NO: 762 - RNA, 76 nt, synthetic construct
  misc_feature 1..76: note = Description of sequence: tRNA-based effector molecule
  source 1..76: mol_type = other RNA
ggctccgtgtagcaatggatagctattaggacttcaaattctaaggttccgggttcgagtcccggcggagtcgcca

SEQ ID NO: 763 - RNA, 76 nt, synthetic construct
  misc_feature 1..76: note = Description of sequence: tRNA-based effector molecule
  source 1..76: mol_type = other RNA
ggctccttggcgcaatggacagcgcattggacttcaaattcaaaggttccgggttcgagtcccggaggagtcgcca

SEQ ID NO: 764 - RNA, 76 nt, synthetic construct
  misc_feature 1..76: note = Description of sequence: tRNA-based effector molecule
  source 1..76: mol_type = other RNA
ggctccttggcgcaatggatagcgcactggacttcaaattcagaggttccgggttcgagtcccggaggagtcgcca

SEQ ID NO: 765 - RNA, 76 nt, synthetic construct
  misc_feature 1..76: note = Description of sequence: tRNA-based effector molecule
  source 1..76: mol_type = other RNA
ggctcgactacgcaatggatagcgtattggacttcaaattcaaaggttccgggttcgagtcccggtcgagtcgcca

SEQ ID NO: 766 - RNA, 76 nt, synthetic construct
  misc_feature 1..76: note = Description of sequence: tRNA-based effector molecule
  source 1..76: mol_type = other RNA
ggctcgctgacgcaatggatagcgtattggacttcaaattcaaaggttccgggttcgagtcccgggcgagtcgcca

SEQ ID NO: 767 - RNA, 76 nt, synthetic construct
  misc_feature 1..76: note = Description of sequence: tRNA-based effector molecule
  source 1..76: mol_type = other RNA
ggctcgggggcgcaatggatagcgcattggacttcaaattcaaaggttccgggttcgagtcccggcggagtcgcca

SEQ ID NO: 768 - RNA, 76 nt, synthetic construct
  misc_feature 1..76: note = Description of sequence: tRNA-based effector molecule
  source 1..76: mol_type = other RNA
ggctctgtggcgcaatggatagcgcataggacttcaaattctaaggttccgggttcgagtcccggcagagtcgcca

SEQ ID NO: 769 - RNA, 76 nt, synthetic construct
  misc_feature 1..76: note = Description of sequence: tRNA-based effector molecule
  source 1..76: mol_type = other RNA
ggctctgtggcgcaatggatagcgcattggacttcaaattcaaaggttccgggttcgaatcccggcggagtcgcca

SEQ ID NO: 770 - RNA, 76 nt, synthetic construct
  misc_feature 1..76: note = Description of sequence: tRNA-based effector molecule
  source 1..76: mol_type = other RNA
ggctctgtggcgcaatggatagcgcattggacttcaaattcaaaggttccgggttcgagccccggcagagtcgcca

SEQ ID NO: 771 - RNA, 76 nt, synthetic construct
  misc_feature 1..76: note = Description of sequence: tRNA-based effector molecule
  source 1..76: mol_type = other RNA
ggctgactggcgcaatggatagcgcattggacttcaaattcaaaggttaggggttcgagtcccctgtcagtcgcca

SEQ ID NO: 772 - RNA, 76 nt, synthetic construct
  misc_feature 1..76: note = Description of sequence: tRNA-based effector molecule
  source 1..76: mol_type = other RNA
ggctgactggcgcaatggatagcgcattggacttcaaattcaaaggttcagggttcgagtccctggtcagtcgcca

SEQ ID NO: 773 - RNA, 76 nt, synthetic construct
  misc_feature 1..76: note = Description of sequence: tRNA-based effector molecule
  source 1..76: mol_type = other RNA
ggctgagtggcgcaatggatagcgcattggacttcaaattcaaaggttgagggttcgagtccctcctcagtcgcca

SEQ ID NO: 774 - RNA, 76 nt, synthetic construct
  misc_feature 1..76: note = Description of sequence: tRNA-based effector molecule
  source 1..76: mol_type = other RNA
ggctgcatggcgcaatggatagcgcattggacttcaaattcaaaggttgggggttcgagtccccctgcagtcgcca

SEQ ID NO: 775 - RNA, 76 nt, synthetic construct
  misc_feature 1..76: note = Description of sequence: tRNA-based effector molecule
  source 1..76: mol_type = other RNA
ggctgcgtggcgcaatggagagcgcattggacttcaaattcaaaggttccgggttcgagtcccggcgcagtcgcca

SEQ ID NO: 776 - RNA, 76 nt, synthetic construct
  misc_feature 1..76: note = Description of sequence: tRNA-based effector molecule
  source 1..76: mol_type = other RNA
ggctgcgtggcgcaatggatagcgcatgggacttcaaattccaaggttccgggttcgagtcccggcgcagtcgcca

SEQ ID NO: 777 - RNA, 76 nt, synthetic construct
  misc_feature 1..76: note = Description of sequence: tRNA-based effector molecule
  source 1..76: mol_type = other RNA
ggctgcttggcgcaatggatagcgcattggacttcaaattcaaaggttaggggttcgagtcccctagcagtcgcca

SEQ ID NO: 778 - RNA, 76 nt, synthetic construct
  misc_feature 1..76: note = Description of sequence: tRNA-based effector molecule
  source 1..76: mol_type = other RNA
ggcttcgtggcgcaatggagagcgcattggacttcaaattcaaaggttccgggttcgagtcccggcggagtcgcca

SEQ ID NO: 779 - RNA, 76 nt, synthetic construct
  misc_feature 1..76: note = Description of sequence: tRNA-based effector molecule
  source 1..76: mol_type = other RNA
ggcttcgtggcgcaatggatagcgcaatggacttcaaattcataggttccgggttcgagtcccggcggagtcgcca

SEQ ID NO: 780 - RNA, 76 nt, synthetic construct
  misc_feature 1..76: note = Description of sequence: tRNA-based effector molecule
  source 1..76: mol_type = other RNA
ggcttcgtggcgcaatggatagcgccttggacttcaaattcaaaggttccgggttcgagtcccggcggagtcgcca

SEQ ID NO: 781 - RNA, 76 nt, synthetic construct
  misc_feature 1..76: note = Description of sequence: tRNA-based effector molecule
  source 1..76: mol_type = other RNA
ggcttgctggcgcaatggatagcgcattggacttcaaattcaaaggttgcgggttcgagtcccgcgcaagtcgcca

SEQ ID NO: 782 - RNA, 76 nt, synthetic construct
  misc_feature 1..76: note = Description of sequence: tRNA-based effector molecule
  source 1..76: mol_type = other RNA
gggctgatggcgcaatggatagcgcattggacttcaaattcaaaggttccgggttcgagtcccggtcagctcgcca

SEQ ID NO: 783 - RNA, 76 nt, synthetic construct
  misc_feature 1..76: note = Description of sequence: tRNA-based effector molecule
  source 1..76: mol_type = other RNA
ggggccgtggcgcaatggatagcgcattggacttcaaattcaaaggttccgggttcgagtcccggcggcctcgcca

SEQ ID NO: 784 - RNA, 76 nt, synthetic construct
  misc_feature 1..76: note = Description of sequence: tRNA-based effector molecule
  source 1..76: mol_type = other RNA
gggtccgtggcgcaatggatagcgcactggacttcaaattcagaggttccgggttcgagtcccggcggactcgcca

SEQ ID NO: 785 - RNA, 76 nt, synthetic construct
  misc_feature 1..76: note = Description of sequence: tRNA-based effector molecule
  source 1..76: mol_type = other RNA
gggtccgtggcgcaatggatagcgcattggacttcaaattcaaaggttccgggttcgagtcccggcggacccgcca

SEQ ID NO: 786 - RNA, 76 nt, synthetic construct
  misc_feature 1..76: note = Description of sequence: tRNA-based effector molecule
  source 1..76: mol_type = other RNA
gggtgagtggcgcaatggatagcgcattggacttcaaattcaaaggttccgggttcgagtcccggctcactcgcca

SEQ ID NO: 787 - RNA, 76 nt, synthetic construct
  misc_feature 1..76: note = Description of sequence: tRNA-based effector molecule
  source 1..76: mol_type = other RNA
ggtcccgtggcgcaatggatagcgcattggacttcaaattcaaaggttccgggttcgagtcccggcgggaccacca

SEQ ID NO: 788 - RNA, 76 nt, synthetic construct
  misc_feature 1..76: note = Description of sequence: tRNA-based effector molecule
  source 1..76: mol_type = other RNA
gtacgtgtggcgcaatggatagcgcattggacttcaaattcaaaggttccgggttcgagtcccggcacgtacgcca

SEQ ID NO: 789 - RNA, 76 nt, synthetic construct
  misc_feature 1..76: note = Description of sequence: tRNA-based effector molecule
  source 1..76: mol_type = other RNA
gtaggcgtggcgcaatggatagcgcattggacttcaaattcaaaggttccgggttcgagtcccggcgcctacgcca

SEQ ID NO: 790 - RNA, 76 nt, synthetic construct
  misc_feature 1..76: note = Description of sequence: tRNA-based effector molecule
  source 1..76: mol_type = other RNA
gtcaccgtggcgcaatggatagcgcattggacttcaaattcaaaggttccgggttcgagtcccggcggtgactcca

SEQ ID NO: 791 - RNA, 76 nt, synthetic construct
  misc_feature 1..76: note = Description of sequence: tRNA-based effector molecule
  source 1..76: mol_type = other RNA
gtctatgtggcgcaatggatagcgcattggacttcaaattcaaaggttccgggttcgagtcccggcatagacgcca

SEQ ID NO: 792 - RNA, 76 nt, synthetic construct
  misc_feature 1..76: note = Description of sequence: tRNA-based effector molecule
  source 1..76: mol_type = other RNA
gtctccgtggcgcaatggatagcgcataggacttcaaattctaaggttccgggttcgagtcccggcggagacgcca

SEQ ID NO: 793 - RNA, 76 nt, synthetic construct
  misc_feature 1..76: note = Description of sequence: tRNA-based effector molecule
  source 1..76: mol_type = other RNA
gtgatcgtggcgcaatggatagcgcattggacttcaaattcaaaggttccgggttcgagtcccggcgatcacgcca

SEQ ID NO: 794 - RNA, 76 nt, synthetic construct
  misc_feature 1..76: note = Description of sequence: tRNA-based effector molecule
  source 1..76: mol_type = other RNA
tacaccgtggcgcaatggatagcgcattggacttcaaattcaaaggttccgggttcgagtcccggcggtgtagcca

SEQ ID NO: 795 - RNA, 76 nt, synthetic construct
  misc_feature 1..76: note = Description of sequence: tRNA-based effector molecule
  source 1..76: mol_type = other RNA
tgctccgtggcgcaatggaaagcgcattggacttcaaattcaaaggttccgggttcgagtcccggcggagtcgcca

SEQ ID NO: 796 - RNA, 76 nt, synthetic construct
  misc_feature 1..76: note = Description of sequence: tRNA-based effector molecule
  source 1..76: mol_type = other RNA
ttcaccgtggcgcaatggatagcgcattggacttcaaattcaaaggttccgggttcgagtcccggcggtgaaacca

SEQ ID NO: 797 - RNA, 76 nt, synthetic construct; identical to SEQ ID NO: 627
  misc_feature 1..76: note = Description of sequence: tRNA-based effector molecule
  source 1..76: mol_type = other RNA
  modified_base 1: mod_base = OTHER; note = 2'-O-methyladenine
  modified_base 61: mod_base = cm
  modified_base 62: mod_base = cm
  modified_base 64: mod_base = gm
  modified_base 65: mod_base = gm
  modified_base 66: mod_base = cm
  modified_base 67: mod_base = gm
  modified_base 68: mod_base = um
  modified_base 69: mod_base = um
  modified_base 70: mod_base = OTHER; note = 2'-fluoro-guanine
  modified_base 71: mod_base = gm
  modified_base 72: mod_base = um
  modified_base 73: mod_base = gm

SEQ ID NO: 798 - RNA, 76 nt, synthetic construct; identical to SEQ ID NO: 639
  misc_feature 1..76: note = Description of sequence: tRNA-based effector molecule
  source 1..76: mol_type = other RNA
  modified_base 1: mod_base = gm
  modified_base 61: mod_base = cm
  modified_base 62: mod_base = cm
  modified_base 64: mod_base = gm
  modified_base 65: mod_base = gm
  modified_base 66: mod_base = cm
  modified_base 67: mod_base = um
  modified_base 68: mod_base = cm
  modified_base 69: mod_base = gm
  modified_base 70: mod_base = OTHER; note = 2'-fluoro-guanine
  modified_base 71: mod_base = gm
  modified_base 72: mod_base = cm
  modified_base 73: mod_base = gm

SEQ ID NO: 799 - RNA, 76 nt, synthetic construct
  misc_feature 1..76: note = Description of sequence: tRNA-based effector molecule
  source 1..76: mol_type = other RNA
  modified_base 1: mod_base = gm
  modified_base 61: mod_base = cm
  modified_base 62: mod_base = cm
  modified_base 64: mod_base = gm
  modified_base 65: mod_base = um
  modified_base 66: mod_base = cm
  modified_base 67: mod_base = gm
  modified_base 68: mod_base = gm
  modified_base 69: mod_base = OTHER; note = 2'-O-methyladenine
  modified_base 70: mod_base = OTHER; note = 2'-fluoro-guanine
  modified_base 71: mod_base = gm
  modified_base 72: mod_base = um
  modified_base 73: mod_base = gm
gcctccgtggcctaatggataaggcatcggccttcaaagccggggattgcgggttcgagtcccgtcggaggtgcca

SEQ ID NO: 800 - RNA, 76 nt, synthetic construct; identical to SEQ ID NO: 641
  misc_feature 1..76: note = Description of sequence: tRNA-based effector molecule
  source 1..76: mol_type = other RNA
  modified_base 1: mod_base = gm
  modified_base 61: mod_base = cm
  modified_base 62: mod_base = cm
  modified_base 64: mod_base = gm
  modified_base 65: mod_base = gm
  modified_base 66: mod_base = cm
  modified_base 67: mod_base = gm
  modified_base 68: mod_base = gm
  modified_base 69: mod_base = OTHER; note = 2'-O-methyladenine
  modified_base 70: mod_base = OTHER; note = 2'-fluoro-guanine
  modified_base 71: mod_base = gm
  modified_base 72: mod_base = cm
  modified_base 73: mod_base = gm

SEQ ID NO: 801 - RNA, 76 nt, synthetic construct; identical to SEQ ID NO: 652
  misc_feature 1..76: note = Description of sequence: tRNA-based effector molecule
  source 1..76: mol_type = other RNA
  modified_base 1: mod_base = gm
  modified_base 61: mod_base = cm
  modified_base 62: mod_base = cm
  modified_base 64: mod_base = gm
  modified_base 65: mod_base = gm
  modified_base 66: mod_base = um
  modified_base 67: mod_base = gm
  modified_base 68: mod_base = gm
  modified_base 69: mod_base = gm
  modified_base 70: mod_base = OTHER; note = 2'-fluoro-guanine
  modified_base 71: mod_base = um
  modified_base 72: mod_base = cm
  modified_base 73: mod_base = gm

SEQ ID NO: 802 - RNA, 76 nt, synthetic construct
  misc_feature 1..76: note = Description of sequence: tRNA-based effector molecule
  source 1..76: mol_type = other RNA
  modified_base 1: mod_base = gm
  modified_base 61: mod_base = cm
  modified_base 62: mod_base = cm
  modified_base 64: mod_base = gm
  modified_base 65: mod_base = cm
  modified_base 66: mod_base = cm
  modified_base 67: mod_base = gm
  modified_base 68: mod_base = gm
  modified_base 69: mod_base = gm
  modified_base 70: mod_base = OTHER; note = 2'-fluoro-guanine
  modified_base 71: mod_base = um
  modified_base 72: mod_base = cm
  modified_base 73: mod_base = gm
ggccccgtggcgcaatggatagcgcgttggacttcaaattcaaaggttgcgggttcgagtcccgccggggtcgcca

SEQ ID NO: 803 - RNA, 76 nt, synthetic construct; identical to SEQ ID NO: 702
  misc_feature 1..76: note = Description of sequence: tRNA-based effector molecule
  source 1..76: mol_type = other RNA
  modified_base 1: mod_base = gm
  modified_base 61: mod_base = cm
  modified_base 62: mod_base = cm
  modified_base 64: mod_base = gm
  modified_base 65: mod_base = gm
  modified_base 66: mod_base = cm
  modified_base 67: mod_base = gm
  modified_base 68: mod_base = gm
  modified_base 69: mod_base = OTHER; note = 2'-O-methyladenine
  modified_base 70: mod_base = OTHER; note = 2'-fluoro-guanine
  modified_base 71: mod_base = um
  modified_base 72: mod_base = cm
  modified_base 73: mod_base = gm

SEQ ID NO: 804 - RNA, 76 nt, synthetic construct; identical to SEQ ID NO: 710
  misc_feature 1..76: note = Description of sequence: tRNA-based effector molecule
  source 1..76: mol_type = other RNA
  modified_base 1: mod_base = gm
  modified_base 61: mod_base = cm
  modified_base 62: mod_base = cm
  modified_base 64: mod_base = gm
  modified_base 65: mod_base = gm
  modified_base 66: mod_base = cm
  modified_base 67: mod_base = gm
  modified_base 68: mod_base = gm
  modified_base 69: mod_base = OTHER; note = 2'-O-methyladenine
  modified_base 70: mod_base = OTHER; note = 2'-fluoro-guanine
  modified_base 71: mod_base = um
  modified_base 72: mod_base = cm
  modified_base 73: mod_base = gm

SEQ ID NO: 805 - RNA, 76 nt, synthetic construct
  misc_feature 1..76: note = Description of sequence: tRNA-based effector molecule
  source 1..76: mol_type = other RNA
  modified_base 1: mod_base = gm
  modified_base 61: mod_base = cm
  modified_base 62: mod_base = cm
  modified_base 64: mod_base = gm
  modified_base 65: mod_base = cm
  modified_base 66: mod_base = cm
  modified_base 67: mod_base = gm
  modified_base 68: mod_base = gm
  modified_base 69: mod_base = OTHER; note = 2'-O-methyladenine
  modified_base 70: mod_base = OTHER; note = 2'-fluoro-guanine
  modified_base 71: mod_base = um
  modified_base 72: mod_base = cm
  modified_base 73: mod_base = gm
ggctccgtggcgcaatggatagcgcattggacttcaaattcaaaggttgcgggttcgagtcccgccggagtcgcca

SEQ ID NO: 806 - RNA, 76 nt, synthetic construct; identical to SEQ ID NO: 743
  misc_feature 1..76: note = Description of sequence: tRNA-based effector molecule
  source 1..76: mol_type = other RNA
  modified_base 1: mod_base = gm
  modified_base 61: mod_base = cm
  modified_base 62: mod_base = cm
  modified_base 64: mod_base = gm
  modified_base 65: mod_base = gm
  modified_base 66: mod_base = cm
  modified_base 67: mod_base = gm
  modified_base 68: mod_base = gm
  modified_base 69: mod_base = OTHER; note = 2'-O-methyladenine
  modified_base 70: mod_base = OTHER; note = 2'-fluoro-guanine
  modified_base 71: mod_base = um
  modified_base 72: mod_base = cm
  modified_base 73: mod_base = gm

SEQ ID NO: 807 - RNA, 76 nt, synthetic construct; identical to SEQ ID NO: 794
  misc_feature 1..76: note = Description of sequence: tRNA-based effector molecule
  source 1..76: mol_type = other RNA
  modified_base 1: mod_base = um
  modified_base 61: mod_base = cm
  modified_base 62: mod_base = cm
  modified_base 64: mod_base = gm
  modified_base 65: mod_base = gm
  modified_base 66: mod_base = cm
  modified_base 67: mod_base = gm
  modified_base 68: mod_base = gm
  modified_base 69: mod_base = um
  modified_base 70: mod_base = OTHER; note = 2'-fluoro-guanine
  modified_base 71: mod_base = um
  modified_base 72: mod_base = OTHER; note = 2'-O-methyladenine
  modified_base 73: mod_base = gm

SEQ ID NO: 808 - RNA, 76 nt, synthetic construct; identical to SEQ ID NO: 627
  misc_feature 1..76: note = Description of sequence: tRNA-based effector molecule
  source 1..76: mol_type = other RNA
  modified_base 1: mod_base = OTHER; note = 2'-O-methyladenine
  modified_base 19: mod_base = OTHER; note = 2'-O-methyladenine
  modified_base 20: mod_base = um
  modified_base 21: mod_base = OTHER; note = 2'-fluoro-adenine
  modified_base 22: mod_base = gm
  modified_base 40: mod_base = OTHER; note = 2'-fluoro-uracil
  modified_base 41: mod_base = cm
  modified_base 42: mod_base = OTHER; note = 2'-O-methyladenine
  modified_base 43: mod_base = OTHER; note = 2'-O-methyladenine
  modified_base 73: mod_base = gm

SEQ ID NO: 809 - RNA, 76 nt, synthetic construct; identical to SEQ ID NO: 639
  misc_feature 1..76: note = Description of sequence: tRNA-based effector molecule
  source 1..76: mol_type = other RNA
  modified_base 1: mod_base = gm
  modified_base 19: mod_base = OTHER; note = 2'-O-methyladenine
  modified_base 20: mod_base = um
  modified_base 21: mod_base = OTHER; note = 2'-fluoro-adenine
  modified_base 22: mod_base = gm
  modified_base 40: mod_base = OTHER; note = 2'-fluoro-uracil
  modified_base 41: mod_base = cm
  modified_base 42: mod_base = OTHER; note = 2'-O-methyladenine
  modified_base 43: mod_base = OTHER; note = 2'-O-methyladenine
  modified_base 73: mod_base = gm

SEQ ID NO: 810 - RNA, 76 nt, synthetic construct; identical to SEQ ID NO: 799
  misc_feature 1..76: note = Description of sequence: tRNA-based effector molecule
  source 1..76: mol_type = other RNA
  modified_base 1: mod_base = gm
  modified_base 19: mod_base = OTHER; note = 2'-O-methyladenine
  modified_base 20: mod_base = um
  modified_base 21: mod_base = OTHER; note = 2'-fluoro-adenine
  modified_base 22: mod_base = OTHER; note = 2'-O-methyladenine
  modified_base 40: mod_base = OTHER; note = 2'-fluoro-cytosine
  modified_base 41: mod_base = cm
  modified_base 42: mod_base = gm
  modified_base 43: mod_base = gm
  modified_base 73: mod_base = gm

SEQ ID NO: 811 - RNA, 76 nt, synthetic construct; identical to SEQ ID NO: 641
  misc_feature 1..76: note = Description of sequence: tRNA-based effector molecule
  source 1..76: mol_type = other RNA
  modified_base 1: mod_base = gm
  modified_base 19: mod_base = OTHER; note = 2'-O-methyladenine
  modified_base 20: mod_base = um
  modified_base 21: mod_base = OTHER; note = 2'-fluoro-adenine
  modified_base 22: mod_base = gm
  modified_base 40: mod_base = OTHER; note = 2'-fluoro-uracil
  modified_base 41: mod_base = cm
  modified_base 42: mod_base = OTHER; note = 2'-O-methyladenine
  modified_base 43: mod_base = cm
  modified_base 73: mod_base = gm

SEQ ID NO: 812 - RNA, 76 nt, synthetic construct; identical to SEQ ID NO: 652
  misc_feature 1..76: note = Description of sequence: tRNA-based effector molecule
  source 1..76: mol_type = other RNA
  modified_base 1: mod_base = gm
  modified_base 19: mod_base = OTHER; note = 2'-O-methyladenine
  modified_base 20: mod_base = um
  modified_base 21: mod_base = OTHER; note = 2'-fluoro-adenine
  modified_base 22: mod_base = gm
  modified_base 40: mod_base = OTHER; note = 2'-fluoro-uracil
  modified_base 41: mod_base = cm
  modified_base 42: mod_base = OTHER; note = 2'-O-methyladenine
  modified_base 43: mod_base = OTHER; note = 2'-O-methyladenine
  modified_base 73: mod_base = gm

SEQ ID NO: 813 - RNA, 76 nt, synthetic construct; identical to SEQ ID NO: 802
  misc_feature 1..76: note = Description of sequence: tRNA-based effector molecule
  source 1..76: mol_type = other RNA
  modified_base 1: mod_base = gm
  modified_base 19: mod_base = OTHER; note = 2'-O-methyladenine
  modified_base 20: mod_base = um
  modified_base 21: mod_base = OTHER; note = 2'-fluoro-adenine
  modified_base 22: mod_base = gm
  modified_base 40: mod_base = OTHER; note = 2'-fluoro-uracil
  modified_base 41: mod_base = cm
  modified_base 42: mod_base = OTHER; note = 2'-O-methyladenine
  modified_base 43: mod_base = OTHER; note = 2'-O-methyladenine
  modified_base 73: mod_base = gm

SEQ ID NO: 814 - RNA, 76 nt, synthetic construct; identical to SEQ ID NO: 702
  misc_feature 1..76: note = Description of sequence: tRNA-based effector molecule
  source 1..76: mol_type = other RNA
  modified_base 1: mod_base = gm
  modified_base 19: mod_base = OTHER; note = 2'-O-methyladenine
  modified_base 20: mod_base = um
  modified_base 21: mod_base = OTHER; note = 2'-fluoro-adenine
  modified_base 22: mod_base = gm
  modified_base 40: mod_base = OTHER; note = 2'-fluoro-cytosine
  modified_base 41: mod_base = gm
  modified_base 42: mod_base = gm
  modified_base 43: mod_base = um
  modified_base 73: mod_base = gm

SEQ ID NO: 815 - RNA, 76 nt, synthetic construct; identical to SEQ ID NO: 710
  misc_feature 1..76: note = Description of sequence: tRNA-based effector molecule
  source 1..76: mol_type = other RNA
  modified_base 1: mod_base = gm
  modified_base 19: mod_base = OTHER; note = 2'-O-methyladenine
  modified_base 20: mod_base = um
  modified_base 21: mod_base = OTHER; note = 2'-fluoro-adenine
  modified_base 22: mod_base = gm
  modified_base 40: mod_base = OTHER; note = 2'-fluoro-uracil
  modified_base 41: mod_base = cm
  modified_base 42: mod_base = gm
  modified_base 43: mod_base = OTHER; note = 2'-O-methyladenine
  modified_base 73: mod_base = gm

SEQ ID NO: 816 - RNA, 76 nt, synthetic construct; identical to SEQ ID NO: 805
  misc_feature 1..76: note = Description of sequence: tRNA-based effector molecule
  source 1..76: mol_type = other RNA
  modified_base 1: mod_base = gm
  modified_base 19: mod_base = OTHER; note = 2'-O-methyladenine
  modified_base 20: mod_base = um
  modified_base 21: mod_base = OTHER; note = 2'-fluoro-adenine
  modified_base 22: mod_base = gm
  modified_base 40: mod_base = OTHER; note = 2'-fluoro-uracil
  modified_base 41: mod_base = cm
  modified_base 42: mod_base = OTHER; note = 2'-O-methyladenine
  modified_base 43: mod_base = OTHER; note = 2'-O-methyladenine
  modified_base 73: mod_base = gm

SEQ ID NO: 817 - RNA, 76 nt, synthetic construct; identical to SEQ ID NO: 743
  misc_feature 1..76: note = Description of sequence: tRNA-based effector molecule
  source 1..76: mol_type = other RNA
  modified_base 1: mod_base = gm
  modified_base 19: mod_base = OTHER; note = 2'-O-methyladenine
  modified_base 20: mod_base = um
  modified_base 21: mod_base = OTHER; note = 2'-fluoro-adenine
  modified_base 22: mod_base = gm
  modified_base 40: mod_base = OTHER; note = 2'-fluoro-uracil
  modified_base 41: mod_base = cm
  modified_base 42: mod_base = OTHER; note = 2'-O-methyladenine
  modified_base 43: mod_base = OTHER; note = 2'-O-methyladenine
  modified_base 73: mod_base = gm

SEQ ID NO: 818 - RNA, 76 nt, synthetic construct; identical to SEQ ID NO: 794
  misc_feature 1..76: note = Description of sequence: tRNA-based effector molecule
  source 1..76: mol_type = other RNA
  modified_base 1: mod_base = um
  modified_base 19: mod_base = OTHER; note = 2'-O-methyladenine
  modified_base 20: mod_base = um
  modified_base 21: mod_base = OTHER; note = 2'-fluoro-adenine
  modified_base 22: mod_base = gm
  modified_base 40: mod_base = OTHER; note = 2'-fluoro-uracil
  modified_base 41: mod_base = cm
  modified_base 42: mod_base = OTHER; note = 2'-O-methyladenine
  modified_base 43: mod_base = OTHER; note = 2'-O-methyladenine
  modified_base 73: mod_base = gm

SEQ ID NO: 819 - RNA, 76 nt, synthetic construct; identical to SEQ ID NO: 627
  misc_feature 1..76: note = Description of sequence: tRNA-based effector molecule
  source 1..76: mol_type = other RNA
  modified_base 1: mod_base = OTHER; note = 2'-O-methyladenine
  modified_base 17: mod_base = gm
  modified_base 18: mod_base = gm
  modified_base 50: mod_base = cm
  modified_base 52: mod_base = gm
  modified_base 73: mod_base = gm

SEQ ID NO: 820 - RNA, 76 nt, synthetic construct; identical to SEQ ID NO: 639
  misc_feature 1..76: note = Description of sequence: tRNA-based effector molecule
  source 1..76: mol_type = other RNA
  modified_base 1: mod_base = gm
  modified_base 17: mod_base = gm
  modified_base 18: mod_base = gm
  modified_base 50: mod_base = cm
  modified_base 52: mod_base = gm
  modified_base 73: mod_base = gm

SEQ ID NO: 821 - RNA, 76 nt, synthetic construct; identical to SEQ ID NO: 799
  misc_feature 1..76: note = Description of sequence: tRNA-based effector molecule
  source 1..76: mol_type = other RNA
  modified_base 1: mod_base = gm
  modified_base 17: mod_base = gm
  modified_base 18: mod_base = gm
  modified_base 50: mod_base = cm
  modified_base 52: mod_base = gm
  modified_base 73: mod_base = gm

SEQ ID NO: 822 - RNA, 76 nt, synthetic construct; identical to SEQ ID NO: 641
  misc_feature 1..76: note = Description of sequence: tRNA-based effector molecule
  source 1..76: mol_type = other RNA
  modified_base 1: mod_base = gm
  modified_base 17: mod_base = gm
  modified_base 18: mod_base = gm
  modified_base 50: mod_base = cm
  modified_base 52: mod_base = gm
  modified_base 73: mod_base = gm

SEQ ID NO: 823 - RNA, 76 nt, synthetic construct; identical to SEQ ID NO: 652
  misc_feature 1..76: note = Description of sequence: tRNA-based effector molecule
  source 1..76: mol_type = other RNA
  modified_base 1: mod_base = gm
  modified_base 17: mod_base = gm
  modified_base 18: mod_base = gm
  modified_base 50: mod_base = cm
  modified_base 52: mod_base = gm
  modified_base 73: mod_base = gm

SEQ ID NO: 824 - RNA, 76 nt, synthetic construct; identical to SEQ ID NO: 802
  misc_feature 1..76: note = Description of sequence: tRNA-based effector molecule
  source 1..76: mol_type = other RNA
  modified_base 1: mod_base = gm
  modified_base 17: mod_base = gm
  modified_base 18: mod_base = gm
  modified_base 50: mod_base = cm
  modified_base 52: mod_base = gm
  modified_base 73: mod_base = gm

SEQ ID NO: 825 - RNA, 76 nt, synthetic construct; identical to SEQ ID NO: 702
  misc_feature 1..76: note = Description of sequence: tRNA-based effector molecule
  source 1..76: mol_type = other RNA
  modified_base 1: mod_base = gm
  modified_base 17: mod_base = gm
  modified_base 18: mod_base = gm
  modified_base 50: mod_base = cm
  modified_base 52: mod_base = gm
  modified_base 73: mod_base = gm

SEQ ID NO: 826 - RNA, 76 nt, synthetic construct; identical to SEQ ID NO: 710
  misc_feature 1..76: note = Description of sequence: tRNA-based effector molecule
  source 1..76: mol_type = other RNA
  modified_base 1: mod_base = gm
  modified_base 17: mod_base = gm
  modified_base 18: mod_base = gm
  modified_base 50: mod_base = cm
  modified_base 52: mod_base = gm
  modified_base 73: mod_base = gm

SEQ ID NO: 827 - RNA, 76 nt, synthetic construct; identical to SEQ ID NO: 805
  misc_feature 1..76: note = Description of sequence: tRNA-based effector molecule
  source 1..76: mol_type = other RNA
  modified_base 1: mod_base = gm
  modified_base 17: mod_base = gm
  modified_base 18: mod_base = gm
  modified_base 50: mod_base = cm
  modified_base 52: mod_base = gm
  modified_base 73: mod_base = gm

SEQ ID NO: 828 - RNA, 76 nt, synthetic construct; identical to SEQ ID NO: 743
  misc_feature 1..76: note = Description of sequence: tRNA-based effector molecule
  source 1..76: mol_type = other RNA
  modified_base 1: mod_base = gm
  modified_base 17: mod_base = gm
  modified_base 18: mod_base = gm
  modified_base 50: mod_base = cm
  modified_base 52: mod_base = gm
  modified_base 73: mod_base = gm

SEQ ID NO: 829 - RNA, 76 nt, synthetic construct; identical to SEQ ID NO: 794
  misc_feature 1..76: note = Description of sequence: tRNA-based effector molecule
  source 1..76: mol_type = other RNA
  modified_base 1: mod_base = um
  modified_base 17: mod_base = gm
  modified_base 18: mod_base = gm
  modified_base 50: mod_base = cm
  modified_base 52: mod_base = gm
  modified_base 73: mod_base = gm

SEQ ID NO: 830 - RNA, 76 nt, synthetic construct; identical to SEQ ID NO: 627
  misc_feature 1..76: note = Description of sequence: tRNA-based effector molecule
  source 1..76: mol_type = other RNA
  modified_base 1: mod_base = OTHER; note = 2'-O-methyladenine
  modified_base 14: mod_base = OTHER; note = 2'-O-methyladenine
  modified_base 15: mod_base = OTHER; note = 2'-O-methyladenine
  modified_base 16: mod_base = um
  modified_base 17: mod_base = gm
  modified_base 18: mod_base = gm
  modified_base 20: mod_base = um
  modified_base 33: mod_base = OTHER; note = 2'-fluoro-uracil
  modified_base 34: mod_base = um
  modified_base 41: mod_base = cm
  modified_base 42: mod_base = OTHER; note = 2'-O-methyladenine
  modified_base 43: mod_base = OTHER; note = 2'-O-methyladenine
  modified_base 44: mod_base = OTHER; note = 2'-O-methyladenine
  modified_base 50: mod_base = cm
  modified_base 52: mod_base = gm
  modified_base 73: mod_base = gm

SEQ ID NO: 831 - RNA, 76 nt, synthetic construct; identical to SEQ ID NO: 639
  misc_feature 1..76: note = Description of sequence: tRNA-based effector molecule
  source 1..76: mol_type = other RNA
  modified_base 1: mod_base = gm
  modified_base 14: mod_base = OTHER; note = 2'-O-methyladenine
  modified_base 15: mod_base = OTHER; note = 2'-O-methyladenine
  modified_base 16: mod_base = um
  modified_base 17: mod_base = gm
  modified_base 18: mod_base = gm
  modified_base 20: mod_base = um
  modified_base 33: mod_base = OTHER; note = 2'-fluoro-uracil
  modified_base 34: mod_base = um
  modified_base 41: mod_base = cm
  modified_base 42: mod_base = OTHER; note = 2'-O-methyladenine
  modified_base 43: mod_base = OTHER; note = 2'-O-methyladenine
  modified_base 44: mod_base = OTHER; note = 2'-O-methyladenine
  modified_base 50: mod_base = cm
  modified_base 52: mod_base = gm
  modified_base 73: mod_base = gm

SEQ ID NO: 832 - RNA, 76 nt, synthetic construct; identical to SEQ ID NO: 799
  misc_feature 1..76: note = Description of sequence: tRNA-based effector molecule
  source 1..76: mol_type = other RNA
  modified_base 1: mod_base = gm
  modified_base 14: mod_base = OTHER; note = 2'-O-methyladenine
  modified_base 15: mod_base = OTHER; note = 2'-O-methyladenine
  modified_base 16: mod_base = um
  modified_base 17: mod_base = gm
  modified_base 18: mod_base = gm
  modified_base 20: mod_base = um
  modified_base 33: mod_base = OTHER; note = 2'-fluoro-uracil
  modified_base 34: mod_base = um
  modified_base 41: mod_base = cm
  modified_base 42: mod_base = gm
  modified_base 43: mod_base = gm
  modified_base 44: mod_base = gm
  modified_base 50: mod_base = cm
  modified_base 52: mod_base = gm
  modified_base 73: mod_base = gm

SEQ ID NO: 833 - RNA, 76 nt, synthetic construct; identical to SEQ ID NO: 641
  misc_feature 1..76: note = Description of sequence: tRNA-based effector molecule
  source 1..76: mol_type = other RNA
  modified_base 1: mod_base = gm
  modified_base 14: mod_base = OTHER; note = 2'-O-methyladenine
  modified_base 15: mod_base = OTHER; note = 2'-O-methyladenine
  modified_base 16: mod_base = um
  modified_base 17: mod_base = gm
  modified_base 18: mod_base = gm
  modified_base 20: mod_base = um
  modified_base 33: mod_base = OTHER; note = 2'-fluoro-uracil
  modified_base 34: mod_base = um
  modified_base 41: mod_base = cm
  modified_base 42: mod_base = OTHER; note = 2'-O-methyladenine
  modified_base 43: mod_base = cm
  modified_base 44: mod_base = OTHER; note = 2'-O-methyladenine
  modified_base 50: mod_base = cm
  modified_base 52: mod_base = gm
  modified_base 73: mod_base = gm

SEQ ID NO: 834 - RNA, 76 nt, synthetic construct; identical to SEQ ID NO: 652
  misc_feature 1..76: note = Description of sequence: tRNA-based effector molecule
  source 1..76: mol_type = other RNA
  modified_base 1: mod_base = gm
  modified_base 14: mod_base = OTHER; note = 2'-O-methyladenine
  modified_base 15: mod_base = OTHER; note = 2'-O-methyladenine
  modified_base 16: mod_base = um
  modified_base 17: mod_base = gm
  modified_base 18: mod_base = gm
  modified_base 20: mod_base = um
  modified_base 33: mod_base = OTHER; note = 2'-fluoro-uracil
  modified_base 34: mod_base = um
  modified_base 41: mod_base = cm
  modified_base 42: mod_base = OTHER; note = 2'-O-methyladenine
  modified_base 43: mod_base = OTHER; note = 2'-O-methyladenine
  modified_base 44: mod_base = OTHER; note = 2'-O-methyladenine
  modified_base 50: mod_base = cm
  modified_base 52: mod_base = gm
  modified_base 73: mod_base = gm

SEQ ID NO: 835 - RNA, 76 nt, synthetic construct; identical to SEQ ID NO: 802
  misc_feature 1..76: note = Description of sequence: tRNA-based effector molecule
  source 1..76: mol_type = other RNA
  modified_base 1: mod_base = gm
  modified_base 14: mod_base = OTHER; note = 2'-O-methyladenine
  modified_base 15: mod_base = OTHER; note = 2'-O-methyladenine
  modified_base 16: mod_base = um
  modified_base 17: mod_base = gm
  modified_base 18: mod_base = gm
  modified_base 20: mod_base = um
  modified_base 33: mod_base = OTHER; note = 2'-fluoro-uracil
  modified_base 34: mod_base = um
  modified_base 41: mod_base = cm
  modified_base 42: mod_base = OTHER; note = 2'-O-methyladenine
  modified_base 43: mod_base = OTHER; note = 2'-O-methyladenine
  modified_base 44: mod_base = OTHER; note = 2'-O-methyladenine
  modified_base 50: mod_base = cm
  modified_base 52: mod_base = gm
  modified_base 73: mod_base = gm

SEQ ID NO: 836 - RNA, 76 nt, synthetic construct; identical to SEQ ID NO: 702
  misc_feature 1..76: note = Description of sequence: tRNA-based effector molecule
  source 1..76: mol_type = other RNA
  modified_base 1: mod_base = gm
  modified_base 14: mod_base = OTHER; note = 2'-O-methyladenine
  modified_base 15: mod_base = OTHER; note = 2'-O-methyladenine
  modified_base 16: mod_base = um
  modified_base 17: mod_base = gm
  modified_base 18: mod_base = gm
  modified_base 20: mod_base = um
  modified_base 33: mod_base = OTHER; note = 2'-fluoro-uracil
  modified_base 34: mod_base = um
  modified_base 41: mod_base = gm
  modified_base 42: mod_base = gm
  modified_base 43: mod_base = um
  modified_base 44: mod_base = OTHER; note = 2'-O-methyladenine
  modified_base 50: mod_base = cm
  modified_base 52: mod_base = gm
  modified_base 73: mod_base = gm

SEQ ID NO: 837 - RNA, 76 nt, synthetic construct; identical to SEQ ID NO: 710
  misc_feature 1..76: note = Description of sequence: tRNA-based effector molecule
  source 1..76: mol_type = other RNA
  modified_base 1: mod_base = gm
  modified_base 14: mod_base = OTHER; note = 2'-O-methyladenine
  modified_base 15: mod_base = OTHER; note = 2'-O-methyladenine
  modified_base 16: mod_base = um
  modified_base 17: mod_base = gm
  modified_base 18: mod_base = gm
  modified_base 20: mod_base = um
  modified_base 33: mod_base = OTHER; note = 2'-fluoro-uracil
  modified_base 34: mod_base = um
  modified_base 41: mod_base = cm
  modified_base 42: mod_base = gm
  modified_base 43: mod_base = OTHER; note = 2'-O-methyladenine
  modified_base 44: mod_base = OTHER; note = 2'-O-methyladenine
  modified_base 50: mod_base = cm
  modified_base 52: mod_base = gm
  modified_base 73: mod_base = gm

SEQ ID NO: 838 - RNA, 76 nt, synthetic construct; identical to SEQ ID NO: 805
  misc_feature 1..76: note = Description of sequence: tRNA-based effector molecule
  source 1..76: mol_type = other RNA
  modified_base 1: mod_base = gm
  modified_base 14: mod_base = OTHER; note = 2'-O-methyladenine
  modified_base 15: mod_base = OTHER; note = 2'-O-methyladenine
  modified_base 16: mod_base = um
  modified_base 17: mod_base = gm
  modified_base 18: mod_base = gm
  modified_base 20: mod_base = um
  modified_base 33: mod_base = OTHER; note = 2'-fluoro-uracil
  modified_base 34: mod_base = um
  modified_base 41: mod_base = cm
  modified_base 42: mod_base = OTHER; note = 2'-O-methyladenine
  modified_base 43: mod_base = OTHER; note = 2'-O-methyladenine
  modified_base 44: mod_base = OTHER; note = 2'-O-methyladenine
  modified_base 50: mod_base = cm
  modified_base 52: mod_base = gm
  modified_base 73: mod_base = gm

SEQ ID NO: 839 - RNA, 76 nt, synthetic construct; identical to SEQ ID NO: 743
  misc_feature 1..76: note = Description of sequence: tRNA-based effector molecule
  source 1..76: mol_type = other RNA
  modified_base 1: mod_base = gm
  modified_base 14: mod_base = OTHER; note = 2'-O-methyladenine
  modified_base 15: mod_base = OTHER; note = 2'-O-methyladenine
  modified_base 16: mod_base = um
  modified_base 17: mod_base = gm
  modified_base 18: mod_base = gm
  modified_base 20: mod_base = um
  modified_base 33: mod_base = OTHER; note = 2'-fluoro-uracil
  modified_base 34: mod_base = um
  modified_base 41: mod_base = cm
  modified_base 42: mod_base = OTHER; note = 2'-O-methyladenine
  modified_base 43: mod_base = OTHER; note = 2'-O-methyladenine
  modified_base 44: mod_base = gm
  modified_base 50: mod_base = cm
  modified_base 52: mod_base = gm
  modified_base 73: mod_base = gm

SEQ ID NO: 840 - RNA, 76 nt, synthetic construct; identical to SEQ ID NO: 794
  misc_feature 1..76: note = Description of sequence: tRNA-based effector molecule
  source 1..76: mol_type = other RNA
  modified_base 1: mod_base = um
  modified_base 14: mod_base = OTHER; note = 2'-O-methyladenine
  modified_base 15: mod_base = OTHER; note = 2'-O-methyladenine
  modified_base 16: mod_base = um
  modified_base 17: mod_base = gm
  modified_base 18: mod_base = gm
  modified_base 20: mod_base = um
  modified_base 33: mod_base = OTHER; note = 2'-fluoro-uracil
  modified_base 34: mod_base = um
  modified_base 41: mod_base = cm
  modified_base 42: mod_base = OTHER; note = 2'-O-methyladenine
  modified_base 43: mod_base = OTHER; note = 2'-O-methyladenine
  modified_base 44: mod_base = OTHER; note = 2'-O-methyladenine
  modified_base 50: mod_base = cm
  modified_base 52: mod_base = gm
  modified_base 73: mod_base = gm

SEQ ID NO: 841 - RNA, 76 nt, synthetic construct; identical to SEQ ID NO: 627
  misc_feature 1..76: note = Description of sequence: tRNA-based effector molecule
  source 1..76: mol_type = other RNA
  modified_base 1: mod_base = OTHER; note = 2'-O-methyladenine
  modified_base 14: mod_base = OTHER; note = 2'-O-methyladenine
  modified_base 15: mod_base = OTHER; note = 2'-fluoro-adenine
  modified_base 16: mod_base = um
  modified_base 17: mod_base = gm
  modified_base 18: mod_base = gm
  modified_base 19: mod_base = OTHER; note = 2'-fluoro-adenine
  modified_base 20: mod_base = um
  modified_base 54: mod_base = um
  modified_base 56: mod_base = cm
  modified_base 57: mod_base = gm
  modified_base 59: mod_base = gm
  modified_base 73: mod_base = gm

SEQ ID NO: 842 - RNA, 76 nt, synthetic construct; identical to SEQ ID NO: 639
  misc_feature 1..76: note = Description of sequence: tRNA-based effector molecule
  source 1..76: mol_type = other RNA
  modified_base 1: mod_base = gm
  modified_base 14: mod_base = OTHER; note = 2'-O-methyladenine
  modified_base 15: mod_base = OTHER; note = 2'-fluoro-adenine
  modified_base 16: mod_base = um
  modified_base 17: mod_base = gm
  modified_base 18: mod_base = gm
  modified_base 19: mod_base = OTHER; note = 2'-fluoro-adenine
  modified_base 20: mod_base = um
  modified_base 54: mod_base = um
  modified_base 56: mod_base = cm
  modified_base 57: mod_base = gm
  modified_base 59: mod_base = gm
  modified_base 73: mod_base = gm

SEQ ID NO: 843 - RNA, 76 nt, synthetic construct; identical to SEQ ID NO: 799
  misc_feature 1..76: note = Description of sequence: tRNA-based effector molecule
  source 1..76: mol_type = other RNA
  modified_base 1: mod_base = gm
  modified_base 14: mod_base = OTHER; note = 2'-O-methyladenine
  modified_base 15: mod_base = OTHER; note = 2'-fluoro-adenine
  modified_base 16: mod_base = um
  modified_base 17: mod_base = gm
  modified_base 18: mod_base = gm
  modified_base 19: mod_base = OTHER; note = 2'-fluoro-adenine
  modified_base 20: mod_base = um
  modified_base 54: mod_base = um
  modified_base 56: mod_base = cm
  modified_base 57: mod_base = gm
  modified_base 59: mod_base = gm
  modified_base 73: mod_base = gm

SEQ ID NO: 844 - RNA, 76 nt, synthetic construct; identical to SEQ ID NO: 641
  misc_feature 1..76: note = Description of sequence: tRNA-based effector molecule
  source 1..76: mol_type = other RNA
  modified_base 1: mod_base = gm
  modified_base 14: mod_base = OTHER; note = 2'-O-methyladenine
  modified_base 15: mod_base = OTHER; note = 2'-fluoro-adenine
  modified_base 16: mod_base = um
  modified_base 17: mod_base = gm
  modified_base 18: mod_base = gm
  modified_base 19: mod_base = OTHER; note = 2'-fluoro-adenine
  modified_base 20: mod_base = um
  modified_base 54: mod_base = um
  modified_base 56: mod_base = cm
  modified_base 57: mod_base = gm
  modified_base 59: mod_base = gm
  modified_base 73: mod_base = gm

SEQ ID NO: 845 - RNA, 76 nt, synthetic construct; identical to SEQ ID NO: 652
  misc_feature 1..76: note = Description of sequence: tRNA-based effector molecule
  source 1..76: mol_type = other RNA
  modified_base 1: mod_base = gm
  modified_base 14: mod_base = OTHER; note = 2'-O-methyladenine
  modified_base 15: mod_base = OTHER; note = 2'-fluoro-adenine
  modified_base 16: mod_base = um
  modified_base 17: mod_base = gm
  modified_base 18: mod_base = gm
  modified_base 19: mod_base = OTHER; note = 2'-fluoro-adenine
  modified_base 20: mod_base = um
  modified_base 54: mod_base = um
  modified_base 56: mod_base = cm
  modified_base 57: mod_base = gm
  modified_base 59: mod_base = gm
  modified_base 73: mod_base = gm

SEQ ID NO: 846 - RNA, 76 nt, synthetic construct; identical to SEQ ID NO: 802
  misc_feature 1..76: note = Description of sequence: tRNA-based effector molecule
  source 1..76: mol_type = other RNA
  modified_base 1: mod_base = gm
  modified_base 14: mod_base = OTHER; note = 2'-O-methyladenine
  modified_base 15: mod_base = OTHER; note = 2'-fluoro-adenine
  modified_base 16: mod_base = um
  modified_base 17: mod_base = gm
  modified_base 18: mod_base = gm
  modified_base 19: mod_base = OTHER; note = 2'-fluoro-adenine
  modified_base 20: mod_base = um
  modified_base 54: mod_base = um
  modified_base 56: mod_base = cm
  modified_base 57: mod_base = gm
  modified_base 59: mod_base = gm
  modified_base 73: mod_base = gm

SEQ ID NO: 847 - RNA, 76 nt, synthetic construct; identical to SEQ ID NO: 702
  misc_feature 1..76: note = Description of sequence: tRNA-based effector molecule
  source 1..76: mol_type = other RNA
  modified_base 1: mod_base = gm
  modified_base 14: mod_base = OTHER; note = 2'-O-methyladenine
  modified_base 15: mod_base = OTHER; note = 2'-fluoro-adenine
  modified_base 16: mod_base = um
  modified_base 17: mod_base = gm
  modified_base 18: mod_base = gm
  modified_base 19: mod_base = OTHER; note = 2'-fluoro-adenine
  modified_base 20: mod_base = um
  modified_base 54: mod_base = um
  modified_base 56: mod_base = cm
  modified_base 57: mod_base = gm
  modified_base 59: mod_base = gm
  modified_base 73: mod_base = gm

SEQ ID NO: 848 - RNA, 76 nt, synthetic construct; identical to SEQ ID NO: 710
  misc_feature 1..76: note = Description of sequence: tRNA-based effector molecule
  source 1..76: mol_type = other RNA
  modified_base 1: mod_base = gm
  modified_base 14: mod_base = OTHER; note = 2'-O-methyladenine
  modified_base 15: mod_base = OTHER; note = 2'-fluoro-adenine
  modified_base 16: mod_base = um
  modified_base 17: mod_base = gm
  modified_base 18: mod_base = gm
  modified_base 19: mod_base = OTHER; note = 2'-fluoro-adenine
  modified_base 20: mod_base = um
  modified_base 54: mod_base = um
  modified_base 56: mod_base = cm
  modified_base 57: mod_base = gm
  modified_base 59: mod_base = gm
  modified_base 73: mod_base = gm

SEQ ID NO: 849 - RNA, 76 nt, synthetic construct; identical to SEQ ID NO: 805
  misc_feature 1..76: note = Description of sequence: tRNA-based effector molecule
  source 1..76: mol_type = other RNA
  modified_base 1: mod_base = gm
  modified_base 14: mod_base = OTHER; note = 2'-O-methyladenine
  modified_base 15: mod_base = OTHER; note = 2'-fluoro-adenine
  modified_base 16: mod_base = um
  modified_base 17: mod_base = gm
  modified_base 18: mod_base = gm
  modified_base 19: mod_base = OTHER; note = 2'-fluoro-adenine
  modified_base 20: mod_base = um
  modified_base 54: mod_base = um
  modified_base 56: mod_base = cm
  modified_base 57: mod_base = gm
  modified_base 59: mod_base = gm
  modified_base 73: mod_base = gm

SEQ ID NO: 850 - RNA, 76 nt, synthetic construct; identical to SEQ ID NO: 743
  misc_feature 1..76: note = Description of sequence: tRNA-based effector molecule
  source 1..76: mol_type = other RNA
  modified_base 1: mod_base = gm
  modified_base 14: mod_base = OTHER; note = 2'-O-methyladenine
  modified_base 15: mod_base = OTHER; note = 2'-fluoro-adenine
  modified_base 16: mod_base = um
  modified_base 17: mod_base = gm
  modified_base 18: mod_base = gm
  modified_base 19: mod_base = OTHER; note = 2'-fluoro-adenine
  modified_base 20: mod_base = um
  modified_base 54: mod_base = um
  modified_base 56: mod_base = cm
  modified_base 57: mod_base = gm
  modified_base 59: mod_base = gm
  modified_base 73: mod_base = gm

SEQ ID NO: 851 - RNA, 76 nt, synthetic construct; identical to SEQ ID NO: 794
  misc_feature 1..76: note = Description of sequence: tRNA-based effector molecule
  source 1..76: mol_type = other RNA
  modified_base 1: mod_base = um
  modified_base 14: mod_base = OTHER; note = 2'-O-methyladenine
  modified_base 15: mod_base = OTHER; note = 2'-fluoro-adenine
  modified_base 16: mod_base = um
  modified_base 17: mod_base = gm
  modified_base 18: mod_base = gm
  modified_base 19: mod_base = OTHER; note = 2'-fluoro-adenine
  modified_base 20: mod_base = um
  modified_base 54: mod_base = um
  modified_base 56: mod_base = cm
  modified_base 57: mod_base = gm
  modified_base 59: mod_base = gm
  modified_base 73: mod_base = gm

SEQ ID NO: 852 - RNA, 76 nt, synthetic construct; identical to SEQ ID NO: 627
  misc_feature 1..76: note = Description of sequence: tRNA-based effector molecule
  source 1..76: mol_type = other RNA
  modified_base 1: mod_base = OTHER; note = 2'-O-methyladenine
  modified_base 14: mod_base = OTHER; note = 2'-O-methyladenine
  modified_base 15: mod_base = OTHER; note = 2'-fluoro-adenine
  modified_base 16: mod_base = um
  modified_base 17: mod_base = gm
  modified_base 18: mod_base = gm
  modified_base 19: mod_base = OTHER; note = 2'-fluoro-adenine
  modified_base 20: mod_base = um
  modified_base 33: mod_base = OTHER; note = 2'-fluoro-uracil
  modified_base 41: mod_base = cm
  modified_base 42: mod_base = OTHER; note = 2'-O-methyladenine
  modified_base 43: mod_base = OTHER; note = 2'-O-methyladenine
  modified_base 44: mod_base = OTHER; note = 2'-O-methyladenine
  modified_base 50: mod_base = cm
  modified_base 52: mod_base = gm
  modified_base 73: mod_base = gm

SEQ ID NO: 853 - RNA, 76 nt, synthetic construct; identical to SEQ ID NO: 639
  misc_feature 1..76: note = Description of sequence: tRNA-based effector molecule
  source 1..76: mol_type = other RNA
  modified_base 1: mod_base = gm
  modified_base 14: mod_base = OTHER; note = 2'-O-methyladenine
  modified_base 15: mod_base = OTHER; note = 2'-fluoro-adenine
  modified_base 16: mod_base = um
  modified_base 17: mod_base = gm
  modified_base 18: mod_base = gm
  modified_base 19: mod_base = OTHER; note = 2'-fluoro-adenine
  modified_base 20: mod_base = um
  modified_base 33: mod_base = OTHER; note = 2'-fluoro-uracil
  modified_base 41: mod_base = cm
  modified_base 42: mod_base = OTHER; note = 2'-O-methyladenine
  modified_base 43: mod_base = OTHER; note = 2'-O-methyladenine
  modified_base 44: mod_base = OTHER; note = 2'-O-methyladenine
  modified_base 50: mod_base = cm
  modified_base 52: mod_base = gm
  modified_base 73: mod_base = gm

SEQ ID NO: 854 - RNA, 76 nt, synthetic construct; identical to SEQ ID NO: 799
  misc_feature 1..76: note = Description of sequence: tRNA-based effector molecule
  source 1..76: mol_type = other RNA
  modified_base 1: mod_base = gm
  modified_base 14: mod_base = OTHER; note = 2'-O-methyladenine
  modified_base 15: mod_base = OTHER; note = 2'-fluoro-adenine
  modified_base 16: mod_base = um
  modified_base 17: mod_base = gm
  modified_base 18: mod_base = gm
  modified_base 19: mod_base = OTHER; note = 2'-fluoro-adenine
  modified_base 20: mod_base = um
  modified_base 33: mod_base = OTHER; note = 2'-fluoro-uracil
  modified_base 41: mod_base = cm
  modified_base 42: mod_base = gm
  modified_base 43: mod_base = gm
  modified_base 44: mod_base = gm
  modified_base 50: mod_base = cm
  modified_base 52: mod_base = gm
  modified_base 73: mod_base = gm

SEQ ID NO: 855 - RNA, 76 nt, synthetic construct; identical to SEQ ID NO: 641
  misc_feature 1..76: note = Description of sequence: tRNA-based effector molecule
  source 1..76: mol_type = other RNA
  modified_base 1: mod_base = gm
  modified_base 14: mod_base = OTHER; note = 2'-O-methyladenine
  modified_base 15: mod_base = OTHER; note = 2'-fluoro-adenine
  modified_base 16: mod_base = um
  modified_base 17: mod_base = gm
  modified_base 18: mod_base = gm
  modified_base 19: mod_base = OTHER; note = 2'-fluoro-adenine
  modified_base 20: mod_base = um
  modified_base 33: mod_base = OTHER; note = 2'-fluoro-uracil
  modified_base 41: mod_base = cm
  modified_base 42: mod_base = OTHER; note = 2'-O-methyladenine
  modified_base 43: mod_base = cm
  modified_base 44: mod_base = OTHER; note = 2'-O-methyladenine
  modified_base 50: mod_base = cm
  modified_base 52: mod_base = gm
  modified_base 73: mod_base = gm

SEQ ID NO: 856 - RNA, 76 nt, synthetic construct; identical to SEQ ID NO: 652
  misc_feature 1..76: note = Description of sequence: tRNA-based effector molecule
  source 1..76: mol_type = other RNA
  modified_base 1: mod_base = gm
  modified_base 14: mod_base = OTHER; note = 2'-O-methyladenine
  modified_base 15: mod_base = OTHER; note = 2'-fluoro-adenine
  modified_base 16: mod_base = um
  modified_base 17: mod_base = gm
  modified_base 18: mod_base = gm
  modified_base 19: mod_base = OTHER; note = 2'-fluoro-adenine
  modified_base 20: mod_base = um
  modified_base 33: mod_base = OTHER; note = 2'-fluoro-uracil
  modified_base 41: mod_base = cm
  modified_base 42: mod_base = OTHER; note = 2'-O-methyladenine
  modified_base 43: mod_base = OTHER; note = 2'-O-methyladenine
  modified_base 44: mod_base = OTHER; note = 2'-O-methyladenine
  modified_base 50: mod_base = cm
  modified_base 52: mod_base = gm
  modified_base 73: mod_base = gm

SEQ ID NO: 857 - RNA, 76 nt, synthetic construct; identical to SEQ ID NO: 802
  misc_feature 1..76: note = Description of sequence: tRNA-based effector molecule
  source 1..76: mol_type = other RNA
  modified_base 1: mod_base = gm
  modified_base 14: mod_base = OTHER; note = 2'-O-methyladenine
  modified_base 15: mod_base = OTHER; note = 2'-fluoro-adenine
  modified_base 16: mod_base = um
  modified_base 17: mod_base = gm
  modified_base 18: mod_base = gm
  modified_base 19: mod_base = OTHER; note = 2'-fluoro-adenine
  modified_base 20: mod_base = um
  modified_base 33: mod_base = OTHER; note = 2'-fluoro-uracil
  modified_base 41: mod_base = cm
  modified_base 42: mod_base = OTHER; note = 2'-O-methyladenine
  modified_base 43: mod_base = OTHER; note = 2'-O-methyladenine
  modified_base 44: mod_base = OTHER; note = 2'-O-methyladenine
  modified_base 50: mod_base = cm
  modified_base 52: mod_base = gm
  modified_base 73: mod_base = gm

SEQ ID NO: 858 - RNA, 76 nt, synthetic construct; identical to SEQ ID NO: 702
  misc_feature 1..76: note = Description of sequence: tRNA-based effector molecule
  source 1..76: mol_type = other RNA
  modified_base 1: mod_base = gm
  modified_base 14: mod_base = OTHER; note = 2'-O-methyladenine
  modified_base 15: mod_base = OTHER; note = 2'-fluoro-adenine
  modified_base 16: mod_base = um
  modified_base 17: mod_base = gm
  modified_base 18: mod_base = gm
  modified_base 19: mod_base = OTHER; note = 2'-fluoro-adenine
  modified_base 20: mod_base = um
  modified_base 33: mod_base = OTHER; note = 2'-fluoro-uracil
  modified_base 41: mod_base = gm
  modified_base 42: mod_base = gm
  modified_base 43: mod_base = um
  modified_base 44: mod_base = OTHER; note = 2'-O-methyladenine
  modified_base 50: mod_base = cm
  modified_base 52: mod_base = gm
  modified_base 73: mod_base = gm

SEQ ID NO: 859 - RNA, 76 nt, synthetic construct; identical to SEQ ID NO: 710
  misc_feature 1..76: note = Description of sequence: tRNA-based effector molecule
  source 1..76: mol_type = other RNA
  modified_base 1: mod_base = gm
  modified_base 14: mod_base = OTHER; note = 2'-O-methyladenine
  modified_base 15: mod_base = OTHER; note = 2'-fluoro-adenine
  modified_base 16: mod_base = um
  modified_base 17: mod_base = gm
  modified_base 18: mod_base = gm
  modified_base 19: mod_base = OTHER; note = 2'-fluoro-adenine
  modified_base 20: mod_base = um
  modified_base 33: mod_base = OTHER; note = 2'-fluoro-uracil
  modified_base 41: mod_base = cm
  modified_base 42: mod_base = gm
  modified_base 43: mod_base = OTHER; note = 2'-O-methyladenine
  modified_base 44: mod_base = OTHER; note = 2'-O-methyladenine
  modified_base 50: mod_base = cm
  modified_base 52: mod_base = gm
  modified_base 73: mod_base = gm

SEQ ID NO: 860 - RNA, 76 nt, synthetic construct; identical to SEQ ID NO: 805
  misc_feature 1..76: note = Description of sequence: tRNA-based effector molecule
  source 1..76: mol_type = other RNA
  modified_base 1: mod_base = gm
  modified_base 14: mod_base = OTHER; note = 2'-O-methyladenine
  modified_base 15: mod_base = OTHER; note = 2'-fluoro-adenine
  modified_base 16: mod_base = um
  modified_base 17: mod_base = gm
  modified_base 18: mod_base = gm
  modified_base 19: mod_base = OTHER; note = 2'-fluoro-adenine
  modified_base 20: mod_base = um
  modified_base 33: mod_base = OTHER; note = 2'-fluoro-uracil
  modified_base 41: mod_base = cm
  modified_base 42: mod_base = OTHER; note = 2'-O-methyladenine
  modified_base 43: mod_base = OTHER; note = 2'-O-methyladenine
  modified_base 44: mod_base = OTHER; note = 2'-O-methyladenine
  modified_base 50: mod_base = cm
  modified_base 52: mod_base = gm
  modified_base 73: mod_base = gm

SEQ ID NO: 861 - RNA, 76 nt, synthetic construct; identical to SEQ ID NO: 743
  misc_feature 1..76: note = Description of sequence: tRNA-based effector molecule
  source 1..76: mol_type = other RNA
  modified_base 1: mod_base = gm
  modified_base 14: mod_base = OTHER; note = 2'-O-methyladenine
  modified_base 15: mod_base = OTHER; note = 2'-fluoro-adenine
  modified_base 16: mod_base = um
  modified_base 17: mod_base = gm
  modified_base 18: mod_base = gm
  modified_base 19: mod_base = OTHER; note = 2'-fluoro-adenine
  modified_base 20: mod_base = um
  modified_base 33: mod_base = OTHER; note = 2'-fluoro-uracil
  modified_base 41: mod_base = cm
  modified_base 42: mod_base = OTHER; note = 2'-O-methyladenine
  modified_base 43: mod_base = OTHER; note = 2'-O-methyladenine
  modified_base 44: mod_base = gm
  modified_base 50: mod_base = cm
  modified_base 52: mod_base = gm
  modified_base 73: mod_base = gm

SEQ ID NO: 862 - RNA, 76 nt, synthetic construct; identical to SEQ ID NO: 794
  misc_feature 1..76: note = Description of sequence: tRNA-based effector molecule
  source 1..76: mol_type = other RNA
  modified_base 1: mod_base = um
  modified_base 14: mod_base = OTHER; note = 2'-O-methyladenine
  modified_base 15: mod_base = OTHER; note = 2'-fluoro-adenine
  modified_base 16: mod_base = um
  modified_base 17: mod_base = gm
  modified_base 18: mod_base = gm
  modified_base 19: mod_base = OTHER; note = 2'-fluoro-adenine
  modified_base 20: mod_base = um
  modified_base 33: mod_base = OTHER; note = 2'-fluoro-uracil
  modified_base 41: mod_base = cm
  modified_base 42: mod_base = OTHER; note = 2'-O-methyladenine
  modified_base 43: mod_base = OTHER; note = 2'-O-methyladenine
  modified_base 44: mod_base = OTHER; note = 2'-O-methyladenine
  modified_base 50: mod_base = cm
  modified_base 52: mod_base = gm
  modified_base 73: mod_base = gm

SEQ ID NO: 863 - RNA, 76 nt, synthetic construct; identical to SEQ ID NO: 627
  misc_feature 1..76: note = Description of sequence: tRNA-based effector molecule
  source 1..76: mol_type = other RNA
  modified_base 1: mod_base = OTHER; note = 2'-O-methyladenine
  modified_base 13: mod_base = cm
  modified_base 17: mod_base = gm
  modified_base 18: mod_base = gm
  modified_base 25: mod_base = cm
  modified_base 34: mod_base = um
  modified_base 41: mod_base = OTHER; note = 2'-fluoro-cytosine
  modified_base 42: mod_base = OTHER; note = 2'-O-methyladenine
  modified_base 43: mod_base = OTHER; note = 2'-O-methyladenine
  modified_base 44: mod_base = OTHER; note = 2'-fluoro-adenine
  modified_base 49: mod_base = cm
  modified_base 50: mod_base = cm
  modified_base 52: mod_base = gm
  modified_base 56: mod_base = cm
  modified_base 59: mod_base = gm
  modified_base 61: mod_base = cm
  modified_base 65: mod_base = gm
  modified_base 73: mod_base = gm

SEQ ID NO: 864 - RNA, 76 nt, synthetic construct; identical to SEQ ID NO: 639
  misc_feature 1..76: note = Description of sequence: tRNA-based effector molecule
  source 1..76: mol_type = other RNA
  modified_base 1: mod_base = gm
  modified_base 13: mod_base = cm
  modified_base 17: mod_base = gm
  modified_base 18: mod_base = gm
  modified_base 25: mod_base = cm
  modified_base 34: mod_base = um
  modified_base 41: mod_base = OTHER; note = 2'-fluoro-cytosine
  modified_base 42: mod_base = OTHER; note = 2'-O-methyladenine
  modified_base 43: mod_base = OTHER; note = 2'-O-methyladenine
  modified_base 44: mod_base = OTHER; note = 2'-fluoro-adenine
  modified_base 49: mod_base = cm
  modified_base 50: mod_base = cm
  modified_base 52: mod_base = gm
  modified_base 56: mod_base = cm
  modified_base 59: mod_base = gm
  modified_base 61: mod_base = cm
  modified_base 65: mod_base = gm
  modified_base 73: mod_base = gm

SEQ ID NO: 865 - RNA, 76 nt, synthetic construct; identical to SEQ ID NO: 799
  misc_feature 1..76: note = Description of sequence: tRNA-based effector molecule
  source 1..76: mol_type = other RNA
  modified_base 1: mod_base = gm
  modified_base 13: mod_base = um
  modified_base 17: mod_base = gm
  modified_base 18: mod_base = gm
  modified_base 25: mod_base = cm
  modified_base 34: mod_base = um
  modified_base 41: mod_base = OTHER; note = 2'-fluoro-cytosine
  modified_base 42: mod_base = gm
  modified_base 43: mod_base = gm
  modified_base 44: mod_base = OTHER; note = 2'-fluoro-guanine
  modified_base 49: mod_base = gm
  modified_base 50: mod_base = cm
  modified_base 52: mod_base = gm
  modified_base 56: mod_base = cm
  modified_base 59: mod_base = gm
  modified_base 61: mod_base = cm
  modified_base 65: mod_base = um
  modified_base 73: mod_base = gm

SEQ ID NO: 866 - RNA, 76 nt, synthetic construct; identical to SEQ ID NO: 641
  misc_feature 1..76: note = Description of sequence: tRNA-based effector molecule
  source 1..76: mol_type = other RNA
  modified_base 1: mod_base = gm
  modified_base 13: mod_base = cm
  modified_base 17: mod_base = gm
  modified_base 18: mod_base = gm
  modified_base 25: mod_base = cm
  modified_base 34: mod_base = um
  modified_base 41: mod_base = OTHER; note = 2'-fluoro-cytosine
  modified_base 42: mod_base = OTHER; note = 2'-O-methyladenine
  modified_base 43: mod_base = cm
  modified_base 44: mod_base = OTHER; note = 2'-fluoro-adenine
  modified_base 49: mod_base = cm
  modified_base 50: mod_base = cm
  modified_base 52: mod_base = gm
  modified_base 56: mod_base = cm
  modified_base 59: mod_base = gm
  modified_base 61: mod_base = cm
  modified_base 65: mod_base = gm
  modified_base 73: mod_base = gm

SEQ ID NO: 867 - RNA, 76 nt, synthetic construct; identical to SEQ ID NO: 652
  misc_feature 1..76: note = Description of sequence: tRNA-based effector molecule
  source 1..76: mol_type = other RNA
  modified_base 1: mod_base = gm
  modified_base 13: mod_base = cm
  modified_base 17: mod_base = gm
  modified_base 18: mod_base = gm
  modified_base 25: mod_base = cm
  modified_base 34: mod_base = um
  modified_base 41: mod_base = OTHER; note = 2'-fluoro-cytosine
  modified_base 42: mod_base = OTHER; note = 2'-O-methyladenine
  modified_base 43: mod_base = OTHER; note = 2'-O-methyladenine
  modified_base 44: mod_base = OTHER; note = 2'-fluoro-adenine
  modified_base 49: mod_base = cm
  modified_base 50: mod_base = cm
  modified_base 52: mod_base = gm
  modified_base 56: mod_base = cm
  modified_base 59: mod_base = gm
  modified_base 61: mod_base = cm
  modified_base 65: mod_base = gm
  modified_base 73: mod_base = gm

SEQ ID NO: 868 - RNA, 76 nt, synthetic construct; identical to SEQ ID NO: 802
  misc_feature 1..76: note = Description of sequence: tRNA-based effector molecule
  source 1..76: mol_type = other RNA
  modified_base 1: mod_base = gm
  modified_base 13: mod_base = cm
  modified_base 17: mod_base = gm
  modified_base 18: mod_base = gm
  modified_base 25: mod_base = cm
  modified_base 34: mod_base = um
  modified_base 41: mod_base = OTHER; note = 2'-fluoro-cytosine
  modified_base 42: mod_base = OTHER; note = 2'-O-methyladenine
  modified_base 43: mod_base = OTHER; note = 2'-O-methyladenine
  modified_base 44: mod_base = OTHER; note = 2'-fluoro-adenine
  modified_base 49: mod_base = gm
  modified_base 50: mod_base = cm
  modified_base 52: mod_base = gm
  modified_base 56: mod_base = cm
  modified_base 59: mod_base = gm
  modified_base 61: mod_base = cm
  modified_base 65: mod_base = cm
  modified_base 73: mod_base = gm

SEQ ID NO: 869 - RNA, 76 nt, synthetic construct; identical to SEQ ID NO: 702
  misc_feature 1..76: note = Description of sequence: tRNA-based effector molecule
  source 1..76: mol_type = other RNA
  modified_base 1: mod_base = gm
  modified_base 13: mod_base = cm
  modified_base 17: mod_base = gm
  modified_base 18: mod_base = gm
  modified_base 25: mod_base = cm
  modified_base 34: mod_base = um
  modified_base 41: mod_base = OTHER; note = 2'-fluoro-guanine
  modified_base 42: mod_base = gm
  modified_base 43: mod_base = um
  modified_base 44: mod_base = OTHER; note = 2'-fluoro-adenine
  modified_base 49: mod_base = cm
  modified_base 50: mod_base = cm
  modified_base 52: mod_base = gm
  modified_base 56: mod_base = cm
  modified_base 59: mod_base = gm
  modified_base 61: mod_base = cm
  modified_base 65: mod_base = gm
  modified_base 73: mod_base = gm

SEQ ID NO: 870 - RNA, 76 nt, synthetic construct; identical to SEQ ID NO: 710
  misc_feature 1..76: note = Description of sequence: tRNA-based effector molecule
  source 1..76: mol_type = other RNA
  modified_base 1: mod_base = gm
  modified_base 13: mod_base = cm
  modified_base 17: mod_base = gm
  modified_base 18: mod_base = gm
  modified_base 25: mod_base = cm
  modified_base 34: mod_base = um
  modified_base 41: mod_base = OTHER; note = 2'-fluoro-cytosine
  modified_base 42: mod_base = gm
  modified_base 43: mod_base = OTHER; note = 2'-O-methyladenine
  modified_base 44: mod_base = OTHER; note = 2'-fluoro-adenine
  modified_base 49: mod_base = cm
  modified_base 50: mod_base = cm
  modified_base 52: mod_base = gm
  modified_base 56: mod_base = cm
  modified_base 59: mod_base = gm
  modified_base 61: mod_base = cm
  modified_base 65: mod_base = gm
  modified_base 73: mod_base = gm

SEQ ID NO: 871 - RNA, 76 nt, synthetic construct; identical to SEQ ID NO: 805
  misc_feature 1..76: note = Description of sequence: tRNA-based effector molecule
  source 1..76: mol_type = other RNA
  modified_base 1: mod_base = gm
  modified_base 13: mod_base = cm
  modified_base 17: mod_base = gm
  modified_base 18: mod_base = gm
  modified_base 25: mod_base = cm
  modified_base 34: mod_base = um
  modified_base 41: mod_base = OTHER; note = 2'-fluoro-cytosine
  modified_base 42: mod_base = OTHER; note = 2'-O-methyladenine
  modified_base 43: mod_base = OTHER; note = 2'-O-methyladenine
  modified_base 44: mod_base = OTHER; note = 2'-fluoro-adenine
  modified_base 49: mod_base = gm
  modified_base 50: mod_base = cm
  modified_base 52: mod_base = gm
  modified_base 56: mod_base = cm
  modified_base 59: mod_base = gm
  modified_base 61: mod_base = cm
  modified_base 65: mod_base = cm
  modified_base 73: mod_base = gm

SEQ ID NO: 872 - RNA, 76 nt, synthetic construct; identical to SEQ ID NO: 743
  misc_feature 1..76: note = Description of sequence: tRNA-based effector molecule
  source 1..76: mol_type = other RNA
  modified_base 1: mod_base = gm
  modified_base 13: mod_base = cm
  modified_base 17: mod_base = gm
  modified_base 18: mod_base = gm
  modified_base 25: mod_base = cm
  modified_base 34: mod_base = um
  modified_base 41: mod_base = OTHER; note = 2'-fluoro-cytosine
  modified_base 42: mod_base = OTHER; note = 2'-O-methyladenine
  modified_base 43: mod_base = OTHER; note = 2'-O-methyladenine
  modified_base 44: mod_base = OTHER; note = 2'-fluoro-guanine
  modified_base 49: mod_base = cm
  modified_base 50: mod_base = cm
  modified_base 52: mod_base = gm
  modified_base 56: mod_base = cm
  modified_base 59: mod_base = gm
  modified_base 61: mod_base = cm
  modified_base 65: mod_base = gm
  modified_base 73: mod_base = gm

SEQ ID NO: 873 - RNA, 76 nt, synthetic construct; identical to SEQ ID NO: 794
  misc_feature 1..76: note = Description of sequence: tRNA-based effector molecule
  source 1..76: mol_type = other RNA
  modified_base 1: mod_base = um
  modified_base 13: mod_base = cm
  modified_base 17: mod_base = gm
  modified_base 18: mod_base = gm
  modified_base 25: mod_base = cm
  modified_base 34: mod_base = um
  modified_base 41: mod_base = OTHER; note = 2'-fluoro-cytosine
  modified_base 42: mod_base = OTHER; note = 2'-O-methyladenine
  modified_base 43: mod_base = OTHER; note = 2'-O-methyladenine
  modified_base 44: mod_base = OTHER; note = 2'-fluoro-adenine
  modified_base 49: mod_base = cm
  modified_base 50: mod_base = cm
  modified_base 52: mod_base = gm
  modified_base 56: mod_base = cm
  modified_base 59: mod_base = gm
  modified_base 61: mod_base = cm
  modified_base 65: mod_base = gm
  modified_base 73: mod_base = gm

SEQ ID NO: 874 - RNA, 76 nt, synthetic construct; identical to SEQ ID NO: 627
  misc_feature 1..76: note = Description of sequence: tRNA-based effector molecule
  source 1..76: mol_type = other RNA
  modified_base 1: mod_base = OTHER; note = 2'-O-methyladenine
  modified_base 13: mod_base = cm
  modified_base 14: mod_base = OTHER; note = 2'-O-methyladenine
  modified_base 15: mod_base = OTHER; note = 2'-O-methyladenine
  modified_base 16: mod_base = um
  modified_base 17: mod_base = gm
  modified_base 18: mod_base = gm
  modified_base 20: mod_base = um
  modified_base 25: mod_base = cm
  modified_base 41: mod_base = OTHER; note = 2'-fluoro-cytosine
  modified_base 42: mod_base = OTHER; note = 2'-O-methyladenine
  modified_base 43: mod_base = OTHER; note = 2'-O-methyladenine
  modified_base 44: mod_base = OTHER; note = 2'-fluoro-adenine
  modified_base 49: mod_base = cm
  modified_base 50: mod_base = cm
  modified_base 51: mod_base = gm
  modified_base 52: mod_base = gm
  modified_base 53: mod_base = gm
  modified_base 61: mod_base = cm
  modified_base 65: mod_base = gm
  modified_base 73: mod_base = gm

SEQ ID NO: 875 - RNA, 76 nt, synthetic construct; identical to SEQ ID NO: 639
  misc_feature 1..76: note = Description of sequence: tRNA-based effector molecule
  source 1..76: mol_type = other RNA
  modified_base 1: mod_base = gm
  modified_base 13: mod_base = cm
  modified_base 14: mod_base = OTHER; note = 2'-O-methyladenine
  modified_base 15: mod_base = OTHER; note = 2'-O-methyladenine
  modified_base 16: mod_base = um
  modified_base 17: mod_base = gm
  modified_base 18: mod_base = gm
  modified_base 20: mod_base = um
  modified_base 25: mod_base = cm
  modified_base 41: mod_base = OTHER; note = 2'-fluoro-cytosine
  modified_base 42: mod_base = OTHER; note = 2'-O-methyladenine
  modified_base 43: mod_base = OTHER; note = 2'-O-methyladenine
  modified_base 44: mod_base = OTHER; note = 2'-fluoro-adenine
  modified_base 49: mod_base = cm
  modified_base 50: mod_base = cm
  modified_base 51: mod_base = gm
  modified_base 52: mod_base = gm
  modified_base 53: mod_base = gm
  modified_base 61: mod_base = cm
  modified_base 65: mod_base = gm
  modified_base 73: mod_base = gm

SEQ ID NO: 876 - RNA, 76 nt, synthetic construct; identical to SEQ ID NO: 799
  misc_feature 1..76: note = Description of sequence: tRNA-based effector molecule
  source 1..76: mol_type = other RNA
  modified_base 1: mod_base = gm
  modified_base 13: mod_base = um
  modified_base 14: mod_base = OTHER; note = 2'-O-methyladenine
  modified_base 15: mod_base = OTHER; note = 2'-O-methyladenine
  modified_base 16: mod_base = um
  modified_base 17: mod_base = gm
  modified_base 18: mod_base = gm
  modified_base 20: mod_base = um
  modified_base 25: mod_base = cm
  modified_base 41: mod_base = OTHER; note = 2'-fluoro-cytosine
  modified_base 42: mod_base = gm
  modified_base 43: mod_base = gm
  modified_base 44: mod_base = OTHER; note = 2'-fluoro-guanine
  modified_base 49: mod_base = gm
  modified_base 50: mod_base = cm
  modified_base 51: mod_base = gm
  modified_base 52: mod_base = gm
  modified_base 53: mod_base = gm
  modified_base 61: mod_base = cm
  modified_base 65: mod_base = um
  modified_base 73: mod_base = gm

SEQ ID NO: 877 - RNA, 76 nt, synthetic construct; identical to SEQ ID NO: 641
  misc_feature 1..76: note = Description of sequence: tRNA-based effector molecule
  source 1..76: mol_type = other RNA
  modified_base 1: mod_base = gm
  modified_base 13: mod_base = cm
  modified_base 14: mod_base = OTHER; note = 2'-O-methyladenine
  modified_base 15: mod_base = OTHER; note = 2'-O-methyladenine
  modified_base 16: mod_base = um
  modified_base 17: mod_base = gm
  modified_base 18: mod_base = gm
  modified_base 20: mod_base = um
  modified_base 25: mod_base = cm
  modified_base 41: mod_base = OTHER; note = 2'-fluoro-cytosine
  modified_base 42: mod_base = OTHER; note = 2'-O-methyladenine
  modified_base 43: mod_base = cm
  modified_base 44: mod_base = OTHER; note = 2'-fluoro-adenine
  modified_base 49: mod_base = cm
  modified_base 50: mod_base = cm
  modified_base 51: mod_base = gm
  modified_base 52: mod_base = gm
  modified_base 53: mod_base = gm
  modified_base 61: mod_base = cm
  modified_base 65: mod_base = gm
  modified_base 73: mod_base = gm

SEQ ID NO: 878 - RNA, 76 nt, synthetic construct; identical to SEQ ID NO: 652
  misc_feature 1..76: note = Description of sequence: tRNA-based effector molecule
  source 1..76: mol_type = other RNA
  modified_base 1: mod_base = gm
  modified_base 13: mod_base = cm
  modified_base 14: mod_base = OTHER; note = 2'-O-methyladenine
  modified_base 15: mod_base = OTHER; note = 2'-O-methyladenine
  modified_base 16: mod_base = um
  modified_base 17: mod_base = gm
  modified_base 18: mod_base = gm
  modified_base 20: mod_base = um
  modified_base 25: mod_base = cm
  modified_base 41: mod_base = OTHER; note = 2'-fluoro-cytosine
  modified_base 42: mod_base = OTHER; note = 2'-O-methyladenine
  modified_base 43: mod_base = OTHER; note = 2'-O-methyladenine
  modified_base 44: mod_base = OTHER; note = 2'-fluoro-adenine
  modified_base 49: mod_base = cm
  modified_base 50: mod_base = cm
  modified_base 51: mod_base = gm
  modified_base 52: mod_base = gm
  modified_base 53: mod_base = gm
  modified_base 61: mod_base = cm
  modified_base 65: mod_base = gm
  modified_base 73: mod_base = gm

SEQ ID NO: 879 - RNA, 76 nt, synthetic construct; identical to SEQ ID NO: 802
  misc_feature 1..76: note = Description of sequence: tRNA-based effector molecule
  source 1..76: mol_type = other RNA
  modified_base 1: mod_base = gm
  modified_base 13: mod_base = cm
  modified_base 14: mod_base = OTHER; note = 2'-O-methyladenine
  modified_base 15: mod_base = OTHER; note = 2'-O-methyladenine
  modified_base 16: mod_base = um
  modified_base 17: mod_base = gm
  modified_base 18: mod_base = gm
  modified_base 20: mod_base = um
  modified_base 25: mod_base = cm
  modified_base 41: mod_base = OTHER; note = 2'-fluoro-cytosine
  modified_base 42: mod_base = OTHER; note = 2'-O-methyladenine
  modified_base 43: mod_base = OTHER; note = 2'-O-methyladenine
  modified_base 44: mod_base = OTHER; note = 2'-fluoro-adenine
  modified_base 49: mod_base = gm
  modified_base 50: mod_base = cm
  modified_base 51: mod_base = gm
  modified_base 52: mod_base = gm
  modified_base 53: mod_base = gm
  modified_base 61: mod_base = cm
  modified_base 65: mod_base = cm
  modified_base 73: mod_base = gm

SEQ ID NO: 880 - RNA, 76 nt, synthetic construct; identical to SEQ ID NO: 702
  misc_feature 1..76: note = Description of sequence: tRNA-based effector molecule
  source 1..76: mol_type = other RNA
  modified_base 1: mod_base = gm
  modified_base 13: mod_base = cm
  modified_base 14: mod_base = OTHER; note = 2'-O-methyladenine
  modified_base 15: mod_base = OTHER; note = 2'-O-methyladenine
  modified_base 16: mod_base = um
  modified_base 17: mod_base = gm
  modified_base 18: mod_base = gm
  modified_base 20: mod_base = um
  modified_base 25: mod_base = cm
  modified_base 41: mod_base = OTHER; note = 2'-fluoro-guanine
  modified_base 42: mod_base = gm
  modified_base 43: mod_base = um
  modified_base 44: mod_base = OTHER; note = 2'-fluoro-adenine
  modified_base 49: mod_base = cm
  modified_base 50: mod_base = cm
  modified_base 51: mod_base = gm
  modified_base 52: mod_base = gm
  modified_base 53: mod_base = gm
  modified_base 61: mod_base = cm
  modified_base 65: mod_base = gm
  modified_base 73: mod_base = gm

SEQ ID NO: 881 - RNA, 76 nt, synthetic construct; identical to SEQ ID NO: 710
  misc_feature 1..76: note = Description of sequence: tRNA-based effector molecule
  source 1..76: mol_type = other RNA
  modified_base 1: mod_base = gm
  modified_base 13: mod_base = cm
  modified_base 14: mod_base = OTHER; note = 2'-O-methyladenine
  modified_base 15: mod_base = OTHER; note = 2'-O-methyladenine
  modified_base 16: mod_base = um
  modified_base 17: mod_base = gm
  modified_base 18: mod_base = gm
  modified_base 20: mod_base = um
  modified_base 25: mod_base = cm
  modified_base 41: mod_base = OTHER; note = 2'-fluoro-cytosine
  modified_base 42: mod_base = gm
  modified_base 43: mod_base = OTHER; note = 2'-O-methyladenine
  modified_base 44: mod_base = OTHER; note = 2'-fluoro-adenine
  modified_base 49: mod_base = cm
  modified_base 50: mod_base = cm
  modified_base 51: mod_base = gm
  modified_base 52: mod_base = gm
  modified_base 53: mod_base = gm
  modified_base 61: mod_base = cm
  modified_base 65: mod_base = gm
  modified_base 73: mod_base = gm

SEQ ID NO: 882 - RNA, 76 nt, synthetic construct; identical to SEQ ID NO: 805
  misc_feature 1..76: note = Description of sequence: tRNA-based effector molecule
  source 1..76: mol_type = other RNA
  modified_base 1: mod_base = gm
  modified_base 13: mod_base = cm
  modified_base 14: mod_base = OTHER; note = 2'-O-methyladenine
  modified_base 15: mod_base = OTHER; note = 2'-O-methyladenine
  modified_base 16: mod_base = um
  modified_base 17: mod_base = gm
  modified_base 18: mod_base = gm
  modified_base 20: mod_base = um
  modified_base 25: mod_base = cm
  modified_base 41: mod_base = OTHER; note = 2'-fluoro-cytosine
  modified_base 42: mod_base = OTHER; note = 2'-O-methyladenine
  modified_base 43: mod_base = OTHER; note = 2'-O-methyladenine
  modified_base 44: mod_base = OTHER; note = 2'-fluoro-adenine
  modified_base 49: mod_base = gm
  modified_base 50: mod_base = cm
  modified_base 51: mod_base = gm
  modified_base 52: mod_base = gm
  modified_base 53: mod_base = gm
  modified_base 61: mod_base = cm
  modified_base 65: mod_base = cm
  modified_base 73: mod_base = gm

SEQ ID NO: 883 - RNA, 76 nt, synthetic construct; identical to SEQ ID NO: 743
  misc_feature 1..76: note = Description of sequence: tRNA-based effector molecule
  source 1..76: mol_type = other RNA
  modified_base 1: mod_base = gm
  modified_base 13: mod_base = cm
  modified_base 14: mod_base = OTHER; note = 2'-O-methyladenine
  modified_base 15: mod_base = OTHER; note = 2'-O-methyladenine
  modified_base 16: mod_base = um
  modified_base 17: mod_base = gm
  modified_base 18: mod_base = gm
  modified_base 20: mod_base = um
  modified_base 25: mod_base = cm
  modified_base 41: mod_base = OTHER; note = 2'-fluoro-cytosine
  modified_base 42: mod_base = OTHER; note = 2'-O-methyladenine
  modified_base 43: mod_base = OTHER; note = 2'-O-methyladenine
  modified_base 44: mod_base = OTHER; note = 2'-fluoro-guanine
  modified_base 49: mod_base = cm
  modified_base 50: mod_base = cm
  modified_base 51: mod_base = gm
  modified_base 52: mod_base = gm
  modified_base 53: mod_base = gm
  modified_base 61: mod_base = cm
  modified_base 65: mod_base = gm
  modified_base 73: mod_base = gm

SEQ ID NO: 884 - RNA, 76 nt, synthetic construct; identical to SEQ ID NO: 794
  misc_feature 1..76: note = Description of sequence: tRNA-based effector molecule
  source 1..76: mol_type = other RNA
  modified_base 1: mod_base = um
  modified_base 13: mod_base = cm
  modified_base 14: mod_base = OTHER; note = 2'-O-methyladenine
  modified_base 15: mod_base = OTHER; note = 2'-O-methyladenine
  modified_base 16: mod_base = um
  modified_base 17: mod_base = gm
  modified_base 18: mod_base = gm
  modified_base 20: mod_base = um
  modified_base 25: mod_base = cm
  modified_base 41: mod_base = OTHER; note = 2'-fluoro-cytosine
  modified_base 42: mod_base = OTHER; note = 2'-O-methyladenine
  modified_base 43: mod_base = OTHER; note = 2'-O-methyladenine
  modified_base 44: mod_base = OTHER; note = 2'-fluoro-adenine
  modified_base 49: mod_base = cm
  modified_base 50: mod_base = cm
  modified_base 51: mod_base = gm
  modified_base 52: mod_base = gm
  modified_base 53: mod_base = gm
  modified_base 61: mod_base = cm
  modified_base 65: mod_base = gm
  modified_base 73: mod_base = gm

SEQ ID NO: 885 - RNA, 76 nt, synthetic construct; identical to SEQ ID NO: 627
  misc_feature 1..76: note = Description of sequence: tRNA-based effector molecule
  source 1..76: mol_type = other RNA
  modified_base 1: mod_base = OTHER; note = 2'-O-methyladenine
  modified_base 10: mod_base = gm
  modified_base 13: mod_base = cm
  modified_base 18: mod_base = gm
  modified_base 20: mod_base = um
  modified_base 25: mod_base = cm
  modified_base 29: mod_base = gm
  modified_base 33: mod_base = OTHER; note = 2'-fluoro-uracil
  modified_base 41: mod_base = OTHER; note = 2'-fluoro-cytosine
  modified_base 43: mod_base = OTHER; note = 2'-O-methyladenine
  modified_base 44: mod_base = OTHER; note = 2'-fluoro-adenine
  modified_base 50: mod_base = cm
  modified_base 52: mod_base = gm
  modified_base 56: mod_base = cm
  modified_base 62: mod_base = cm
  modified_base 63: mod_base = OTHER; note = 2'-fluoro-cytosine
  modified_base 65: mod_base = gm
  modified_base 71: mod_base = gm
  modified_base 73: mod_base = gm

SEQ ID NO: 886 - RNA, 76 nt, synthetic construct; identical to SEQ ID NO: 639
  misc_feature 1..76: note = Description of sequence: tRNA-based effector molecule
  source 1..76: mol_type = other RNA
  modified_base 1: mod_base = gm
  modified_base 10: mod_base = gm
  modified_base 13: mod_base = cm
  modified_base 18: mod_base = gm
  modified_base 20: mod_base = um
  modified_base 25: mod_base = cm
  modified_base 29: mod_base = gm
  modified_base 33: mod_base = OTHER; note = 2'-fluoro-uracil
  modified_base 41: mod_base = OTHER; note = 2'-fluoro-cytosine
  modified_base 43: mod_base = OTHER; note = 2'-O-methyladenine
  modified_base 44: mod_base = OTHER; note = 2'-fluoro-adenine
  modified_base 50: mod_base = cm
  modified_base 52: mod_base = gm
  modified_base 56: mod_base = cm
  modified_base 62: mod_base = cm
  modified_base 63: mod_base = OTHER; note = 2'-fluoro-cytosine
  modified_base 65: mod_base = gm
  modified_base 71: mod_base = gm
  modified_base 73: mod_base = gm

SEQ ID NO: 887 - RNA, 76 nt, synthetic construct; identical to SEQ ID NO: 799
  misc_feature 1..76: note = Description of sequence: tRNA-based effector molecule
  source 1..76: mol_type = other RNA
  modified_base 1: mod_base = gm
  modified_base 10: mod_base = gm
  modified_base 13: mod_base = um
  modified_base 18: mod_base = gm
  modified_base 20: mod_base = um
  modified_base 25: mod_base = cm
  modified_base 29: mod_base = gm
  modified_base 33: mod_base = OTHER; note = 2'-fluoro-uracil
  modified_base 41: mod_base = OTHER; note = 2'-fluoro-cytosine
  modified_base 43: mod_base = gm
  modified_base 44: mod_base = OTHER; note = 2'-fluoro-guanine
  modified_base 50: mod_base = cm
  modified_base 52: mod_base = gm
  modified_base 56: mod_base = cm
  modified_base 62: mod_base = cm
  modified_base 63: mod_base = OTHER; note = 2'-fluoro-cytosine
  modified_base 65: mod_base = um
  modified_base 71: mod_base = gm
  modified_base 73: mod_base = gm

SEQ ID NO: 888 - RNA, 76 nt, synthetic construct; identical to SEQ ID NO: 641
  misc_feature 1..76: note = Description of sequence: tRNA-based effector molecule
  source 1..76: mol_type = other RNA
  modified_base 1: mod_base = gm
  modified_base 10: mod_base = gm
  modified_base 13: mod_base = cm
  modified_base 18: mod_base = gm
  modified_base 20: mod_base = um
  modified_base 25: mod_base = cm
  modified_base 29: mod_base = gm
  modified_base 33: mod_base = OTHER; note = 2'-fluoro-uracil
  modified_base 41: mod_base = OTHER; note = 2'-fluoro-cytosine
  modified_base 43: mod_base = cm
  modified_base 44: mod_base = OTHER; note = 2'-fluoro-adenine
  modified_base 50: mod_base = cm
  modified_base 52: mod_base = gm
  modified_base 56: mod_base = cm
  modified_base 62: mod_base = cm
  modified_base 63: mod_base = OTHER; note = 2'-fluoro-cytosine
  modified_base 65: mod_base = gm
  modified_base 71: mod_base = gm
  modified_base 73: mod_base = gm

SEQ ID NO: 889 - RNA, 76 nt, synthetic construct; identical to SEQ ID NO: 652
  misc_feature 1..76: note = Description of sequence: tRNA-based effector molecule
  source 1..76: mol_type = other RNA
  modified_base 1: mod_base = gm
  modified_base 10: mod_base = gm
  modified_base 13: mod_base = cm
  modified_base 18: mod_base = gm
  modified_base 20: mod_base = um
  modified_base 25: mod_base = cm
  modified_base 29: mod_base = gm
  modified_base 33: mod_base = OTHER; note = 2'-fluoro-uracil
  modified_base 41: mod_base = OTHER; note = 2'-fluoro-cytosine
  modified_base 43: mod_base = OTHER; note = 2'-O-methyladenine
  modified_base 44: mod_base = OTHER; note = 2'-fluoro-adenine
  modified_base 50: mod_base = cm
  modified_base 52: mod_base = gm
  modified_base 56: mod_base = cm
  modified_base 62: mod_base = cm
  modified_base 63: mod_base = OTHER; note = 2'-fluoro-cytosine
  modified_base 65: mod_base = gm
  modified_base 71: mod_base = um
  modified_base 73: mod_base = gm

SEQ ID NO: 890 - RNA, 76 nt, synthetic construct; identical to SEQ ID NO: 802
  misc_feature 1..76: note = Description of sequence: tRNA-based effector molecule
  source 1..76: mol_type = other RNA
  modified_base 1: mod_base = gm
  modified_base 10: mod_base = gm
  modified_base 13: mod_base = cm
  modified_base 18: mod_base = gm
  modified_base 20: mod_base = um
  modified_base 25: mod_base = cm
  modified_base 29: mod_base = gm
  modified_base 33: mod_base = OTHER; note = 2'-fluoro-uracil
  modified_base 41: mod_base = OTHER; note = 2'-fluoro-cytosine
  modified_base 43: mod_base = OTHER; note = 2'-O-methyladenine
  modified_base 44: mod_base = OTHER; note = 2'-fluoro-adenine
  modified_base 50: mod_base = cm
  modified_base 52: mod_base = gm
  modified_base 56: mod_base = cm
  modified_base 62: mod_base = cm
  modified_base 63: mod_base = OTHER; note = 2'-fluoro-cytosine
  modified_base 65: mod_base = cm
  modified_base 71: mod_base = um
  modified_base 73: mod_base = gm

SEQ ID NO: 891 - RNA, 76 nt, synthetic construct; identical to SEQ ID NO: 702
  misc_feature 1..76: note = Description of sequence: tRNA-based effector molecule
  source 1..76: mol_type = other RNA
  modified_base 1: mod_base = gm
  modified_base 10: mod_base = gm
  modified_base 13: mod_base = cm
  modified_base 18: mod_base = gm
  modified_base 20: mod_base = um
  modified_base 25: mod_base = cm
  modified_base 29: mod_base = cm
  modified_base 33: mod_base = OTHER; note = 2'-fluoro-uracil
  modified_base 41: mod_base = OTHER; note = 2'-fluoro-guanine
  modified_base 43: mod_base = um
  modified_base 44: mod_base = OTHER; note = 2'-fluoro-adenine
  modified_base 50: mod_base = cm
  modified_base 52: mod_base = gm
  modified_base 56: mod_base = cm
  modified_base 62: mod_base = cm
  modified_base 63: mod_base = OTHER; note = 2'-fluoro-cytosine
  modified_base 65: mod_base = gm
  modified_base 71: mod_base = um
  modified_base 73: mod_base = gm

SEQ ID NO: 892 - RNA, 76 nt, synthetic construct; identical to SEQ ID NO: 710
  misc_feature 1..76: note = Description of sequence: tRNA-based effector molecule
  source 1..76: mol_type = other RNA
  modified_base 1: mod_base = gm
  modified_base 10: mod_base = gm
  modified_base 13: mod_base = cm
  modified_base 18: mod_base = gm
  modified_base 20: mod_base = um
  modified_base 25: mod_base = cm
  modified_base 29: mod_base = gm
  modified_base 33: mod_base = OTHER; note = 2'-fluoro-uracil
  modified_base 41: mod_base = OTHER; note = 2'-fluoro-cytosine
  modified_base 43: mod_base = OTHER; note = 2'-O-methyladenine
  modified_base 44: mod_base = OTHER; note = 2'-fluoro-adenine
  modified_base 50: mod_base = cm
  modified_base 52: mod_base = gm
  modified_base 56: mod_base = cm
  modified_base 62: mod_base = cm
  modified_base 63: mod_base = OTHER; note = 2'-fluoro-cytosine
  modified_base 65: mod_base = gm
  modified_base 71: mod_base = um
  modified_base 73: mod_base = gm

SEQ ID NO: 893 - RNA, 76 nt, synthetic construct; identical to SEQ ID NO: 805
  misc_feature 1..76: note = Description of sequence: tRNA-based effector molecule
  source 1..76: mol_type = other RNA
  modified_base 1: mod_base = gm
  modified_base 10: mod_base = gm
  modified_base 13: mod_base = cm
  modified_base 18: mod_base = gm
  modified_base 20: mod_base = um
  modified_base 25: mod_base = cm
  modified_base 29: mod_base = gm
  modified_base 33: mod_base = OTHER; note = 2'-fluoro-uracil
  modified_base 41: mod_base = OTHER; note = 2'-fluoro-cytosine
  modified_base 43: mod_base = OTHER; note = 2'-O-methyladenine
  modified_base 44: mod_base = OTHER; note = 2'-fluoro-adenine
  modified_base 50: mod_base = cm
  modified_base 52: mod_base = gm
  modified_base 56: mod_base = cm
  modified_base 62: mod_base = cm
  modified_base 63: mod_base = OTHER; note = 2'-fluoro-cytosine
  modified_base 65: mod_base = cm
  modified_base 71: mod_base = um
  modified_base 73: mod_base = gm

SEQ ID NO: 894 - RNA, 76 nt, synthetic construct; identical to SEQ ID NO: 743
  misc_feature 1..76: note = Description of sequence: tRNA-based effector molecule
  source 1..76: mol_type = other RNA
  modified_base 1: mod_base = gm
  modified_base 10: mod_base = gm
  modified_base 13: mod_base = cm
  modified_base 18: mod_base = gm
  modified_base 20: mod_base = um
  modified_base 25: mod_base = cm
  modified_base 29: mod_base = gm
  modified_base 33: mod_base = OTHER; note = 2'-fluoro-uracil
  modified_base 41: mod_base = OTHER; note = 2'-fluoro-cytosine
  modified_base 43: mod_base = OTHER; note = 2'-O-methyladenine
  modified_base 44: mod_base = OTHER; note = 2'-fluoro-guanine
  modified_base 50: mod_base = cm
  modified_base 52: mod_base = gm
  modified_base 56: mod_base = cm
  modified_base 62: mod_base = cm
  modified_base 63: mod_base = OTHER; note = 2'-fluoro-cytosine
  modified_base 65: mod_base = gm
  modified_base 71: mod_base = um
  modified_base 73: mod_base = gm

SEQ ID NO: 895 - RNA, 76 nt, synthetic construct; identical to SEQ ID NO: 794
  misc_feature 1..76: note = Description of sequence: tRNA-based effector molecule
  source 1..76: mol_type = other RNA
  modified_base 1: mod_base = um
  modified_base 10: mod_base = gm
  modified_base 13: mod_base = cm
  modified_base 18: mod_base = gm
  modified_base 20: mod_base = um
  modified_base 25: mod_base = cm
  modified_base 29: mod_base = gm
  modified_base 33: mod_base = OTHER; note = 2'-fluoro-uracil
  modified_base 41: mod_base = OTHER; note = 2'-fluoro-cytosine
  modified_base 43: mod_base = OTHER; note = 2'-O-methyladenine
  modified_base 44: mod_base = OTHER; note = 2'-fluoro-adenine
  modified_base 50: mod_base = cm
  modified_base 52: mod_base = gm
  modified_base 56: mod_base = cm
  modified_base 62: mod_base = cm
  modified_base 63: mod_base = OTHER; note = 2'-fluoro-cytosine
  modified_base 65: mod_base = gm
  modified_base 71: mod_base = um
  modified_base 73: mod_base = gm

SEQ ID NO: 896 - RNA, 76 nt, synthetic construct; identical to SEQ ID NO: 627
  misc_feature 1..76: note = Description of sequence: tRNA-based effector molecule
  source 1..76: mol_type = other RNA
  modified_base 1: mod_base = OTHER; note = 2'-O-methyladenine
  modified_base 2: mod_base = cm
  modified_base 3: mod_base = cm
  modified_base 4: mod_base = OTHER; note = 2'-O-methyladenine
  modified_base 5: mod_base = OTHER; note = 2'-O-methyladenine
  modified_base 6: mod_base = cm
  modified_base 16: mod_base = um
  modified_base 17: mod_base = gm
  modified_base 18: mod_base = gm
  modified_base 33: mod_base = OTHER; note = 2'-fluoro-uracil
  modified_base 44: mod_base = OTHER; note = 2'-O-methyladenine
  modified_base 45: mod_base = gm
  modified_base 46: mod_base = OTHER; note = 2'-fluoro-guanine
  modified_base 47: mod_base = OTHER; note = 2'-fluoro-uracil
  modified_base 48: mod_base = OTHER; note = 2'-fluoro-uracil
  modified_base 56: mod_base = cm
  modified_base 59: mod_base = gm
  modified_base 61: mod_base = cm
  modified_base 62: mod_base = cm
  modified_base 63: mod_base = OTHER; note = 2'-fluoro-cytosine
  modified_base 64: mod_base = gm
  modified_base 65: mod_base = gm
  modified_base 66: mod_base = cm
  modified_base 67: mod_base = gm
  modified_base 68: mod_base = um
  modified_base 73: mod_base = gm

SEQ ID NO: 897 - RNA, 76 nt, synthetic construct; identical to SEQ ID NO: 639
  misc_feature 1..76: note = Description of sequence: tRNA-based effector molecule
  source 1..76: mol_type = other RNA
  modified_base 1: mod_base = gm
  modified_base 2: mod_base = cm
  modified_base 3: mod_base = cm
  modified_base 4: mod_base = cm
  modified_base 5: mod_base = gm
  modified_base 6: mod_base = OTHER; note = 2'-O-methyladenine
  modified_base 16: mod_base = um
  modified_base 17: mod_base = gm
  modified_base 18: mod_base = gm
  modified_base 33: mod_base = OTHER; note = 2'-fluoro-uracil
  modified_base 44: mod_base = OTHER; note = 2'-O-methyladenine
  modified_base 45: mod_base = gm
  modified_base 46: mod_base = OTHER; note = 2'-fluoro-guanine
  modified_base 47: mod_base = OTHER; note = 2'-fluoro-uracil
  modified_base 48: mod_base = OTHER; note = 2'-fluoro-uracil
  modified_base 56: mod_base = cm
  modified_base 59: mod_base = gm
  modified_base 61: mod_base = cm
  modified_base 62: mod_base = cm
  modified_base 63: mod_base = OTHER; note = 2'-fluoro-cytosine
  modified_base 64: mod_base = gm
  modified_base 65: mod_base = gm
  modified_base 66: mod_base = cm
  modified_base 67: mod_base = um
  modified_base 68: mod_base = cm
  modified_base 73: mod_base = gm

SEQ ID NO: 898 - RNA, 76 nt, synthetic construct; identical to SEQ ID NO: 799
  misc_feature 1..76: note = Description of sequence: tRNA-based effector molecule
  source 1..76: mol_type = other RNA
  modified_base 1: mod_base = gm
  modified_base 2: mod_base = cm
  modified_base 3: mod_base = cm
  modified_base 4: mod_base = um
  modified_base 5: mod_base = cm
  modified_base 6: mod_base = cm
  modified_base 16: mod_base = um
  modified_base 17: mod_base = gm
  modified_base 18: mod_base = gm
  modified_base 33: mod_base = OTHER; note = 2'-fluoro-uracil
  modified_base 44: mod_base = gm
  modified_base 45: mod_base = gm
  modified_base 46: mod_base = OTHER; note = 2'-fluoro-adenine
  modified_base 47: mod_base = OTHER; note = 2'-fluoro-uracil
  modified_base 48: mod_base = OTHER; note = 2'-fluoro-uracil
  modified_base 56: mod_base = cm
  modified_base 59: mod_base = gm
  modified_base 61: mod_base = cm
  modified_base 62: mod_base = cm
  modified_base 63: mod_base = OTHER; note = 2'-fluoro-cytosine
  modified_base 64: mod_base = gm
  modified_base 65: mod_base = um
  modified_base 66: mod_base = cm
  modified_base 67: mod_base = gm
  modified_base 68: mod_base = gm
  modified_base 73: mod_base = gm

SEQ ID NO: 899 - RNA, 76 nt, synthetic construct; identical to SEQ ID NO: 641
  misc_feature 1..76: note = Description of sequence: tRNA-based effector molecule
  source 1..76: mol_type = other RNA
  modified_base 1: mod_base = gm
  modified_base 2: mod_base = cm
  modified_base 3: mod_base = cm
  modified_base 4: mod_base = um
  modified_base 5: mod_base = cm
  modified_base 6: mod_base = cm
  modified_base 16: mod_base = um
  modified_base 17: mod_base = gm
  modified_base 18: mod_base = gm
  modified_base 33: mod_base = OTHER; note = 2'-fluoro-uracil
  modified_base 44: mod_base = OTHER; note = 2'-O-methyladenine
  modified_base 45: mod_base = gm
  modified_base 46: mod_base = OTHER; note = 2'-fluoro-guanine
  modified_base 47: mod_base = OTHER; note = 2'-fluoro-uracil
  modified_base 48: mod_base = OTHER; note = 2'-fluoro-uracil
  modified_base 56: mod_base = cm
  modified_base 59: mod_base = gm
  modified_base 61: mod_base = cm
  modified_base 62: mod_base = cm
  modified_base 63: mod_base = OTHER; note = 2'-fluoro-cytosine
  modified_base 64: mod_base = gm
  modified_base 65: mod_base = gm
  modified_base 66: mod_base = cm
  modified_base 67: mod_base = gm
  modified_base 68: mod_base = gm
  modified_base 73: mod_base = gm

SEQ ID NO: 900 - RNA, 76 nt, synthetic construct; identical to SEQ ID NO: 652
  misc_feature 1..76: note = Description of sequence: tRNA-based effector molecule
  source 1..76: mol_type = other RNA
  modified_base 1: mod_base = gm
  modified_base 2: mod_base = gm
  modified_base 3: mod_base = cm
  modified_base 4: mod_base = cm
  modified_base 5: mod_base = cm
  modified_base 6: mod_base = cm
  modified_base 16: mod_base = um
  modified_base 17: mod_base = gm
  modified_base 18: mod_base = gm
  modified_base 33: mod_base = OTHER; note = 2'-fluoro-uracil
  modified_base 44: mod_base = OTHER; note = 2'-O-methyladenine
  modified_base 45: mod_base = gm
  modified_base 46: mod_base = OTHER; note = 2'-fluoro-guanine
  modified_base 47: mod_base = OTHER; note = 2'-fluoro-uracil
  modified_base 48: mod_base = OTHER; note = 2'-fluoro-uracil
  modified_base 56: mod_base = cm
  modified_base 59: mod_base = gm
  modified_base 61: mod_base = cm
  modified_base 62: mod_base = cm
  modified_base 63: mod_base = OTHER; note = 2'-fluoro-cytosine
  modified_base 64: mod_base = gm
  modified_base 65: mod_base = gm
  modified_base 66: mod_base = um
  modified_base 67: mod_base = gm
  modified_base 68: mod_base = gm
  modified_base 73: mod_base = gm

SEQ ID NO: 901 - RNA, 76 nt, synthetic construct; identical to SEQ ID NO: 802
  misc_feature 1..76: note = Description of sequence: tRNA-based effector molecule
  source 1..76: mol_type = other RNA
  modified_base 1: mod_base = gm
  modified_base 2: mod_base = gm
  modified_base 3: mod_base = cm
  modified_base 4: mod_base = cm
  modified_base 5: mod_base = cm
  modified_base 6: mod_base = cm
  modified_base 16: mod_base = um
  modified_base 17: mod_base = gm
  modified_base 18: mod_base = gm
  modified_base 33: mod_base = OTHER; note = 2'-fluoro-uracil
  modified_base 44: mod_base = OTHER; note = 2'-O-methyladenine
  modified_base 45: mod_base = gm
  modified_base 46: mod_base = OTHER; note = 2'-fluoro-guanine
  modified_base 47: mod_base = OTHER; note = 2'-fluoro-uracil
  modified_base 48: mod_base = OTHER; note = 2'-fluoro-uracil
  modified_base 56: mod_base = cm
  modified_base 59: mod_base = gm
  modified_base 61: mod_base = cm
  modified_base 62: mod_base = cm
  modified_base 63: mod_base = OTHER; note = 2'-fluoro-cytosine
  modified_base 64: mod_base = gm
  modified_base 65: mod_base = cm
  modified_base 66: mod_base = cm
  modified_base 67: mod_base = gm
  modified_base 68: mod_base = gm
  modified_base 73: mod_base = gm

SEQ ID NO: 902 - RNA, 76 nt, synthetic construct; identical to SEQ ID NO: 702
  misc_feature 1..76: note = Description of sequence: tRNA-based effector molecule
  source 1..76: mol_type = other RNA
  modified_base 1: mod_base = gm
  modified_base 2: mod_base = gm
  modified_base 3: mod_base = cm
  modified_base 4: mod_base = um
  modified_base 5: mod_base = cm
  modified_base 6: mod_base = cm
  modified_base 16: mod_base = um
  modified_base 17: mod_base = gm
  modified_base 18: mod_base = gm
  modified_base 33: mod_base = OTHER; note = 2'-fluoro-uracil
  modified_base 44: mod_base = OTHER; note = 2'-O-methyladenine
  modified_base 45: mod_base = gm
  modified_base 46: mod_base = OTHER; note = 2'-fluoro-guanine
  modified_base 47: mod_base = OTHER; note = 2'-fluoro-uracil
  modified_base 48: mod_base = OTHER; note = 2'-fluoro-uracil
  modified_base 56: mod_base = cm
  modified_base 59: mod_base = gm
  modified_base 61: mod_base = cm
  modified_base 62: mod_base = cm
  modified_base 63: mod_base = OTHER; note = 2'-fluoro-cytosine
  modified_base 64: mod_base = gm
  modified_base 65: mod_base = gm
  modified_base 66: mod_base = cm
  modified_base 67: mod_base = gm
  modified_base 68: mod_base = gm
  modified_base 73: mod_base = gm

SEQ ID NO: 903 - RNA, 76 nt, synthetic construct; identical to SEQ ID NO: 710
  misc_feature 1..76: note = Description of sequence: tRNA-based effector molecule
  source 1..76: mol_type = other RNA
  modified_base 1: mod_base = gm
  modified_base 2: mod_base = gm
  modified_base 3: mod_base = cm
  modified_base 4: mod_base = um
  modified_base 5: mod_base = cm
  modified_base 6: mod_base = cm
  modified_base 16: mod_base = um
  modified_base 17: mod_base = gm
  modified_base 18: mod_base = gm
  modified_base 33: mod_base = OTHER; note = 2'-fluoro-uracil
  modified_base 44: mod_base = OTHER; note = 2'-O-methyladenine
  modified_base 45: mod_base = gm
  modified_base 46: mod_base = OTHER; note = 2'-fluoro-guanine
  modified_base 47: mod_base = OTHER; note = 2'-fluoro-uracil
  modified_base 48: mod_base = OTHER; note = 2'-fluoro-uracil
  modified_base 56: mod_base = cm
  modified_base 59: mod_base = gm
  modified_base 61: mod_base = cm
  modified_base 62: mod_base = cm
  modified_base 63: mod_base = OTHER; note = 2'-fluoro-cytosine
  modified_base 64: mod_base = gm
  modified_base 65: mod_base = gm
  modified_base 66: mod_base = cm
  modified_base 67: mod_base = gm
  modified_base 68: mod_base = gm
  modified_base 73: mod_base = gm

SEQ ID NO: 904 - RNA, 76 nt, synthetic construct; identical to SEQ ID NO: 805
  misc_feature 1..76: note = Description of sequence: tRNA-based effector molecule
  source 1..76: mol_type = other RNA
  modified_base 1: mod_base = gm
  modified_base 2: mod_base = gm
  modified_base 3: mod_base = cm
  modified_base 4: mod_base = um
  modified_base 5: mod_base = cm
  modified_base 6: mod_base = cm
  modified_base 16: mod_base = um
  modified_base 17: mod_base = gm
  modified_base 18: mod_base = gm
  modified_base 33: mod_base = OTHER; note = 2'-fluoro-uracil
  modified_base 44: mod_base = OTHER; note = 2'-O-methyladenine
  modified_base 45: mod_base = gm
  modified_base 46: mod_base = OTHER; note = 2'-fluoro-guanine
  modified_base 47: mod_base = OTHER; note = 2'-fluoro-uracil
  modified_base 48: mod_base = OTHER; note = 2'-fluoro-uracil
  modified_base 56: mod_base = cm
  modified_base 59: mod_base = gm
  modified_base 61: mod_base = cm
  modified_base 62: mod_base = cm
  modified_base 63: mod_base = OTHER; note = 2'-fluoro-cytosine
  modified_base 64: mod_base = gm
  modified_base 65: mod_base = cm
  modified_base 66: mod_base = cm
  modified_base 67: mod_base = gm
  modified_base 68: mod_base = gm
  modified_base 73: mod_base = gm

SEQ ID NO: 905 - RNA, 76 nt, synthetic construct; identical to SEQ ID NO: 743
  misc_feature 1..76: note = Description of sequence: tRNA-based effector molecule
  source 1..76: mol_type = other RNA
  modified_base 1: mod_base = gm
  modified_base 2: mod_base = gm
  modified_base 3: mod_base = cm
  modified_base 4: mod_base = um
  modified_base 5: mod_base = cm
  modified_base 6: mod_base = cm
  modified_base 16: mod_base = um
  modified_base 17: mod_base = gm
  modified_base 18: mod_base = gm
  modified_base 33: mod_base = OTHER; note = 2'-fluoro-uracil
  modified_base 44: mod_base = gm
  modified_base 45: mod_base = gm
  modified_base 46: mod_base = OTHER; note = 2'-fluoro-guanine
  modified_base 47: mod_base = OTHER; note = 2'-fluoro-uracil
  modified_base 48: mod_base = OTHER; note = 2'-fluoro-uracil
  modified_base 56: mod_base = cm
  modified_base 59: mod_base = gm
  modified_base 61: mod_base = cm
  modified_base 62: mod_base = cm
  modified_base 63: mod_base = OTHER; note = 2'-fluoro-cytosine
  modified_base 64: mod_base = gm
  modified_base 65: mod_base = gm
  modified_base 66: mod_base = cm
  modified_base 67: mod_base = gm
  modified_base 68: mod_base = gm
  modified_base 73: mod_base = gm

SEQ ID NO: 906 - RNA, 76 nt, synthetic construct; identical to SEQ ID NO: 794
  misc_feature 1..76: note = Description of sequence: tRNA-based effector molecule
  source 1..76: mol_type = other RNA
  modified_base 1: mod_base = um
  modified_base 2: mod_base = OTHER; note = 2'-O-methyladenine
  modified_base 3: mod_base = cm
  modified_base 4: mod_base = OTHER; note = 2'-O-methyladenine
  modified_base 5: mod_base = cm
  modified_base 6: mod_base = cm
  modified_base 16: mod_base = um
  modified_base 17: mod_base = gm
  modified_base 18: mod_base = gm
  modified_base 33: mod_base = OTHER; note = 2'-fluoro-uracil
  modified_base 44: mod_base = OTHER; note = 2'-O-methyladenine
  modified_base 45: mod_base = gm
  modified_base 46: mod_base = OTHER; note = 2'-fluoro-guanine
  modified_base 47: mod_base = OTHER; note = 2'-fluoro-uracil
  modified_base 48: mod_base = OTHER; note = 2'-fluoro-uracil
  modified_base 56: mod_base = cm
  modified_base 59: mod_base = gm
  modified_base 61: mod_base = cm
  modified_base 62: mod_base = cm
  modified_base 63: mod_base = OTHER; note = 2'-fluoro-cytosine
  modified_base 64: mod_base = gm
  modified_base 65: mod_base = gm
  modified_base 66: mod_base = cm
  modified_base 67: mod_base = gm
  modified_base 68: mod_base = gm
  modified_base 73: mod_base = gm

SEQ ID NO: 907 - RNA, 76 nt, synthetic construct; identical to SEQ ID NO: 627
  misc_feature 1..76: note = Description of sequence: tRNA-based effector molecule
  source 1..76: mol_type = other RNA
  modified_base 1: mod_base = OTHER; note = 2'-O-methyladenine
  modified_base 2: mod_base = cm
  modified_base 3: mod_base = cm
  modified_base 4: mod_base = OTHER; note = 2'-O-methyladenine
  modified_base 5: mod_base = OTHER; note = 2'-O-methyladenine
  modified_base 6: mod_base = cm
  modified_base 16: mod_base = um
  modified_base 17: mod_base = gm
  modified_base 18: mod_base = gm
  modified_base 20: mod_base = um
  modified_base 25: mod_base = cm
  modified_base 33: mod_base = OTHER; note = 2'-fluoro-uracil
  modified_base 41: mod_base = cm
  modified_base 42: mod_base = OTHER; note = 2'-O-methyladenine
  modified_base 43: mod_base = OTHER; note = 2'-O-methyladenine
  modified_base 44: mod_base = OTHER; note = 2'-O-methyladenine
  modified_base 49: mod_base = cm
  modified_base 50: mod_base = cm
  modified_base 52: mod_base = gm
  modified_base 61: mod_base = cm
  modified_base 65: mod_base = gm
  modified_base 73: mod_base = gm

SEQ ID NO: 908 - RNA, 76 nt, synthetic construct; identical to SEQ ID NO: 639
  misc_feature 1..76: note = Description of sequence: tRNA-based effector molecule
  source 1..76: mol_type = other RNA
  modified_base 1: mod_base = gm
  modified_base 2: mod_base = cm
  modified_base 3: mod_base = cm
  modified_base 4: mod_base = cm
  modified_base 5: mod_base = gm
  modified_base 6: mod_base = OTHER; note = 2'-O-methyladenine
  modified_base 16: mod_base = um
  modified_base 17: mod_base = gm
  modified_base 18: mod_base = gm
  modified_base 20: mod_base = um
  modified_base 25: mod_base = cm
  modified_base 33: mod_base = OTHER; note = 2'-fluoro-uracil
  modified_base 41: mod_base = cm
  modified_base 42: mod_base = OTHER; note = 2'-O-methyladenine
  modified_base 43: mod_base = OTHER; note = 2'-O-methyladenine
  modified_base 44: mod_base = OTHER; note = 2'-O-methyladenine
  modified_base 49: mod_base = cm
  modified_base 50: mod_base = cm
  modified_base 52: mod_base = gm
  modified_base 61: mod_base = cm
  modified_base 65: mod_base = gm
  modified_base 73: mod_base = gm

SEQ ID NO: 909 - RNA, 76 nt, synthetic construct; identical to SEQ ID NO: 799
  misc_feature 1..76: note = Description of sequence: tRNA-based effector molecule
  source 1..76: mol_type = other RNA
  modified_base 1: mod_base = gm
  modified_base 2: mod_base = cm
  modified_base 3: mod_base = cm
  modified_base 4: mod_base = um
  modified_base 5: mod_base = cm
  modified_base 6: mod_base = cm
  modified_base 16: mod_base = um
  modified_base 17: mod_base = gm
  modified_base 18: mod_base = gm
  modified_base 20: mod_base = um
  modified_base 25: mod_base = cm
  modified_base 33: mod_base = OTHER; note = 2'-fluoro-uracil
  modified_base 41: mod_base = cm
  modified_base 42: mod_base = gm
  modified_base 43: mod_base = gm
  modified_base 44: mod_base = gm
  modified_base 49: mod_base = gm
  modified_base 50: mod_base = cm
  modified_base 52: mod_base = gm
  modified_base 61: mod_base = cm
  modified_base 65: mod_base = um
  modified_base 73: mod_base = gm

SEQ ID NO: 910 - RNA, 76 nt, synthetic construct; identical to SEQ ID NO: 641
  misc_feature 1..76: note = Description of sequence: tRNA-based effector molecule
  source 1..76: mol_type = other RNA
  modified_base 1: mod_base = gm
  modified_base 2: mod_base = cm
  modified_base 3: mod_base = cm
  modified_base 4: mod_base = um
  modified_base 5: mod_base = cm
  modified_base 6: mod_base = cm
  modified_base 16: mod_base = um
  modified_base 17: mod_base = gm
  modified_base 18: mod_base = gm
  modified_base 20: mod_base = um
  modified_base 25: mod_base = cm
  modified_base 33: mod_base = OTHER; note = 2'-fluoro-uracil
  modified_base 41: mod_base = cm
  modified_base 42: mod_base = OTHER; note = 2'-O-methyladenine
  modified_base 43: mod_base = cm
  modified_base 44: mod_base = OTHER; note = 2'-O-methyladenine
  modified_base 49: mod_base = cm
  modified_base 50: mod_base = cm
  modified_base 52: mod_base = gm
  modified_base 61: mod_base = cm
  modified_base 65: mod_base = gm
  modified_base 73: mod_base = gm

SEQ ID NO: 911 - RNA, 76 nt, synthetic construct; identical to SEQ ID NO: 652
  misc_feature 1..76: note = Description of sequence: tRNA-based effector molecule
  source 1..76: mol_type = other RNA
  modified_base 1: mod_base = gm
  modified_base 2: mod_base = gm
  modified_base 3: mod_base = cm
  modified_base 4: mod_base = cm
  modified_base 5: mod_base = cm
  modified_base 6: mod_base = cm
  modified_base 16: mod_base = um
  modified_base 17: mod_base = gm
  modified_base 18: mod_base = gm
  modified_base 20: mod_base = um
  modified_base 25: mod_base = cm
  modified_base 33: mod_base = OTHER; note = 2'-fluoro-uracil
  modified_base 41: mod_base = cm
  modified_base 42: mod_base = OTHER; note = 2'-O-methyladenine
  modified_base 43: mod_base = OTHER; note = 2'-O-methyladenine
  modified_base 44: mod_base = OTHER; note = 2'-O-methyladenine
  modified_base 49: mod_base = cm
  modified_base 50: mod_base = cm
  modified_base 52: mod_base = gm
  modified_base 61: mod_base = cm
  modified_base 65: mod_base = gm
  modified_base 73: mod_base = gm

SEQ ID NO: 912 - RNA, 76 nt, synthetic construct; identical to SEQ ID NO: 802
  misc_feature 1..76: note = Description of sequence: tRNA-based effector molecule
  source 1..76: mol_type = other RNA
  modified_base 1: mod_base = gm
  modified_base 2: mod_base = gm
  modified_base 3: mod_base = cm
  modified_base 4: mod_base = cm
  modified_base 5: mod_base = cm
  modified_base 6: mod_base = cm
  modified_base 16: mod_base = um
  modified_base 17: mod_base = gm
  modified_base 18: mod_base = gm
  modified_base 20: mod_base = um
  modified_base 25: mod_base = cm
  modified_base 33: mod_base = OTHER; note = 2'-fluoro-uracil
  modified_base 41: mod_base = cm
  modified_base 42: mod_base = OTHER; note = 2'-O-methyladenine
  modified_base 43: mod_base = OTHER; note = 2'-O-methyladenine
  modified_base 44: mod_base = OTHER; note = 2'-O-methyladenine
  modified_base 49: mod_base = gm
  modified_base 50: mod_base = cm
  modified_base 52: mod_base = gm
  modified_base 61: mod_base = cm
  modified_base 65: mod_base = cm
  modified_base 73: mod_base = gm

SEQ ID NO: 913 - RNA, 76 nt, synthetic construct; identical to SEQ ID NO: 702
  misc_feature 1..76: note = Description of sequence: tRNA-based effector molecule
  source 1..76: mol_type = other RNA
  modified_base 1: mod_base = gm
  modified_base 2: mod_base = gm
  modified_base 3: mod_base = cm
  modified_base 4: mod_base = um
  modified_base 5: mod_base = cm
  modified_base 6: mod_base = cm
  modified_base 16: mod_base = um
  modified_base 17: mod_base = gm
  modified_base 18: mod_base = gm
  modified_base 20: mod_base = um
  modified_base 25: mod_base = cm
  modified_base 33: mod_base = OTHER; note = 2'-fluoro-uracil
  modified_base 41: mod_base = gm
  modified_base 42: mod_base = gm
  modified_base 43: mod_base = um
  modified_base 44: mod_base = OTHER; note = 2'-O-methyladenine
  modified_base 49: mod_base = cm
  modified_base 50: mod_base = cm
  modified_base 52: mod_base = gm
  modified_base 61: mod_base = cm
  modified_base 65: mod_base = gm
  modified_base 73: mod_base = gm

SEQ ID NO: 914 - RNA, 76 nt, synthetic construct; identical to SEQ ID NO: 710
  misc_feature 1..76: note = Description of sequence: tRNA-based effector molecule
  source 1..76: mol_type = other RNA
  modified_base 1: mod_base = gm
  modified_base 2: mod_base = gm
  modified_base 3: mod_base = cm
  modified_base 4: mod_base = um
  modified_base 5: mod_base = cm
  modified_base 6: mod_base = cm
  modified_base 16: mod_base = um
  modified_base 17: mod_base = gm
  modified_base 18: mod_base = gm
  modified_base 20: mod_base = um
  modified_base 25: mod_base = cm
  modified_base 33: mod_base = OTHER; note = 2'-fluoro-uracil
  modified_base 41: mod_base = cm
  modified_base 42: mod_base = gm
  modified_base 43: mod_base = OTHER; note = 2'-O-methyladenine
  modified_base 44: mod_base = OTHER; note = 2'-O-methyladenine
  modified_base 49: mod_base = cm
  modified_base 50: mod_base = cm
  modified_base 52: mod_base = gm
  modified_base 61: mod_base = cm
  modified_base 65: mod_base = gm
  modified_base 73: mod_base = gm

SEQ ID NO: 915 - RNA, 76 nt, synthetic construct; identical to SEQ ID NO: 805
  misc_feature 1..76: note = Description of sequence: tRNA-based effector molecule
  source 1..76: mol_type = other RNA
  modified_base 1: mod_base = gm
  modified_base 2: mod_base = gm
  modified_base 3: mod_base = cm
  modified_base 4: mod_base = um
  modified_base 5: mod_base = cm
  modified_base 6: mod_base = cm
  modified_base 16: mod_base = um
  modified_base 17: mod_base = gm
  modified_base 18: mod_base = gm
  modified_base 20: mod_base = um
  modified_base 25: mod_base = cm
  modified_base 33: mod_base = OTHER; note = 2'-fluoro-uracil
  modified_base 41: mod_base = cm
  modified_base 42: mod_base = OTHER; note = 2'-O-methyladenine
  modified_base 43: mod_base = OTHER; note = 2'-O-methyladenine
  modified_base 44: mod_base = OTHER; note = 2'-O-methyladenine
  modified_base 49: mod_base = gm
  modified_base 50: mod_base = cm
  modified_base 52: mod_base = gm
  modified_base 61: mod_base = cm
  modified_base 65: mod_base = cm
  modified_base 73: mod_base = gm

SEQ ID NO: 916 - RNA, 76 nt, synthetic construct; identical to SEQ ID NO: 743
  misc_feature 1..76: note = Description of sequence: tRNA-based effector molecule
  source 1..76: mol_type = other RNA
  modified_base 1: mod_base = gm
  modified_base 2: mod_base = gm
  modified_base 3: mod_base = cm
  modified_base 4: mod_base = um
  modified_base 5: mod_base = cm
  modified_base 6: mod_base = cm
  modified_base 16: mod_base = um
  modified_base 17: mod_base = gm
  modified_base 18: mod_base = gm
  modified_base 20: mod_base = um
  modified_base 25: mod_base = cm
  modified_base 33: mod_base = OTHER; note = 2'-fluoro-uracil
  modified_base 41: mod_base = cm
  modified_base 42: mod_base = OTHER; note = 2'-O-methyladenine
  modified_base 43: mod_base = OTHER; note = 2'-O-methyladenine
  modified_base 44: mod_base = gm
  modified_base 49: mod_base = cm
  modified_base 50: mod_base = cm
  modified_base 52: mod_base = gm
  modified_base 61: mod_base = cm
  modified_base 65: mod_base = gm
  modified_base 73: mod_base = gm

SEQ ID NO: 917 - RNA, 76 nt, synthetic construct; identical to SEQ ID NO: 794
  misc_feature 1..76: note = Description of sequence: tRNA-based effector molecule
  source 1..76: mol_type = other RNA
  modified_base 1: mod_base = um
  modified_base 2: mod_base = OTHER; note = 2'-O-methyladenine
  modified_base 3: mod_base = cm
  modified_base 4: mod_base = OTHER; note = 2'-O-methyladenine
  modified_base 5: mod_base = cm
  modified_base 6: mod_base = cm
  modified_base 16: mod_base = um
  modified_base 17: mod_base = gm
  modified_base 18: mod_base = gm
  modified_base 20: mod_base = um
  modified_base 25: mod_base = cm
  modified_base 33: mod_base = OTHER; note = 2'-fluoro-uracil
  modified_base 41: mod_base = cm
  modified_base 42: mod_base = OTHER; note = 2'-O-methyladenine
  modified_base 43: mod_base = OTHER; note = 2'-O-methyladenine
  modified_base 44: mod_base = OTHER; note = 2'-O-methyladenine
  modified_base 49: mod_base = cm
  modified_base 50: mod_base = cm
  modified_base 52: mod_base = gm
  modified_base 61: mod_base = cm
  modified_base 65: mod_base = gm
  modified_base 73: mod_base = gm

SEQ ID NO: 918 - RNA, 76 nt, synthetic construct; identical to SEQ ID NO: 627
  misc_feature 1..76: note = Description of sequence: tRNA-based effector molecule
  source 1..76: mol_type = other RNA
  modified_base 1: mod_base = OTHER; note = 2'-O-methyladenine
  modified_base 2: mod_base = cm
  modified_base 3: mod_base = cm
  modified_base 4: mod_base = OTHER; note = 2'-O-methyladenine
  modified_base 5: mod_base = OTHER; note = 2'-O-methyladenine
  modified_base 6: mod_base = cm
  modified_base 16: mod_base = um
  modified_base 17: mod_base = gm
  modified_base 18: mod_base = gm
  modified_base 20: mod_base = um
  modified_base 25: mod_base = cm
  modified_base 33: mod_base = OTHER; note = 2'-fluoro-uracil
  modified_base 41: mod_base = OTHER; note = 2'-fluoro-cytosine
  modified_base 42: mod_base = OTHER; note = 2'-O-methyladenine
  modified_base 43: mod_base = OTHER; note = 2'-O-methyladenine
  modified_base 44: mod_base = OTHER; note = 2'-fluoro-adenine
  modified_base 49: mod_base = cm
  modified_base 50: mod_base = cm
  modified_base 52: mod_base = gm
  modified_base 54: mod_base = um
  modified_base 56: mod_base = cm
  modified_base 57: mod_base = OTHER; note = 2'-fluoro-guanine
  modified_base 59: mod_base = gm
  modified_base 61: mod_base = cm
  modified_base 62: mod_base = cm
  modified_base 63: mod_base = OTHER; note = 2'-fluoro-cytosine
  modified_base 64: mod_base = gm
  modified_base 65: mod_base = gm
  modified_base 73: mod_base = gm

SEQ ID NO: 919 - RNA, 76 nt, synthetic construct; identical to SEQ ID NO: 639
  misc_feature 1..76: note = Description of sequence: tRNA-based effector molecule
  source 1..76: mol_type = other RNA
  modified_base 1: mod_base = gm
  modified_base 2: mod_base = cm
  modified_base 3: mod_base = cm
  modified_base 4: mod_base = cm
  modified_base 5: mod_base = gm
  modified_base 6: mod_base = OTHER; note = 2'-O-methyladenine
  modified_base 16: mod_base = um
  modified_base 17: mod_base = gm
  modified_base 18: mod_base = gm
  modified_base 20: mod_base = um
  modified_base 25: mod_base = cm
  modified_base 33: mod_base = OTHER; note = 2'-fluoro-uracil
  modified_base 41: mod_base = OTHER; note = 2'-fluoro-cytosine
  modified_base 42: mod_base = OTHER; note = 2'-O-methyladenine
  modified_base 43: mod_base = OTHER; note = 2'-O-methyladenine
  modified_base 44: mod_base = OTHER; note = 2'-fluoro-adenine
  modified_base 49: mod_base = cm
  modified_base 50: mod_base = cm
  modified_base 52: mod_base = gm
  modified_base 54: mod_base = um
  modified_base 56: mod_base = cm
  modified_base 57: mod_base = OTHER; note = 2'-fluoro-guanine
  modified_base 59: mod_base = gm
  modified_base 61: mod_base = cm
  modified_base 62: mod_base = cm
  modified_base 63: mod_base = OTHER; note = 2'-fluoro-cytosine
  modified_base 64: mod_base = gm
  modified_base 65: mod_base = gm
  modified_base 73: mod_base = gm

SEQ ID NO: 920 - RNA, 76 nt, synthetic construct; identical to SEQ ID NO: 799
  misc_feature 1..76: note = Description of sequence: tRNA-based effector molecule
  source 1..76: mol_type = other RNA
  modified_base 1: mod_base = gm
  modified_base 2: mod_base = cm
  modified_base 3: mod_base = cm
  modified_base 4: mod_base = um
  modified_base 5: mod_base = cm
  modified_base 6: mod_base = cm
  modified_base 16: mod_base = um
  modified_base 17: mod_base = gm
  modified_base 18: mod_base = gm
  modified_base 20: mod_base = um
  modified_base 25: mod_base = cm
  modified_base 33: mod_base = OTHER; note = 2'-fluoro-uracil
  modified_base 41: mod_base = OTHER; note = 2'-fluoro-cytosine
  modified_base 42: mod_base = gm
  modified_base 43: mod_base = gm
  modified_base 44: mod_base = OTHER; note = 2'-fluoro-guanine
  modified_base 49: mod_base = gm
  modified_base 50: mod_base = cm
  modified_base 52: mod_base = gm
  modified_base 54: mod_base = um
  modified_base 56: mod_base = cm
  modified_base 57: mod_base = OTHER; note = 2'-fluoro-guanine
  modified_base 59: mod_base = gm
  modified_base 61: mod_base = cm
  modified_base 62: mod_base = cm
  modified_base 63: mod_base = OTHER; note = 2'-fluoro-cytosine
  modified_base 64: mod_base = gm
  modified_base 65: mod_base = um
  modified_base 73: mod_base = gm

SEQ ID NO: 921 - RNA, 76 nt, synthetic construct; identical to SEQ ID NO: 641
  misc_feature 1..76: note = Description of sequence: tRNA-based effector molecule
  source 1..76: mol_type = other RNA
  modified_base 1: mod_base = gm
  modified_base 2: mod_base = cm
  modified_base 3: mod_base = cm
  modified_base 4: mod_base = um
  modified_base 5: mod_base = cm
  modified_base 6: mod_base = cm
  modified_base 16: mod_base = um
  modified_base 17: mod_base = gm
  modified_base 18: mod_base = gm
  modified_base 20: mod_base = um
  modified_base 25: mod_base = cm
  modified_base 33: mod_base = OTHER; note = 2'-fluoro-uracil
  modified_base 41: mod_base = OTHER; note = 2'-fluoro-cytosine
  modified_base 42: mod_base = OTHER; note = 2'-O-methyladenine
  modified_base 43: mod_base = cm
  modified_base 44: mod_base = OTHER; note = 2'-fluoro-adenine
  modified_base 49: mod_base = cm
  modified_base 50: mod_base = cm
  modified_base 52: mod_base = gm
  modified_base 54: mod_base = um
  modified_base 56: mod_base = cm
  modified_base 57: mod_base = OTHER; note = 2'-fluoro-guanine
  modified_base 59: mod_base = gm
  modified_base 61: mod_base = cm
  modified_base 62: mod_base = cm
  modified_base 63: mod_base = OTHER; note = 2'-fluoro-cytosine
  modified_base 64: mod_base = gm
  modified_base 65: mod_base = gm
  modified_base 73: mod_base = gm

SEQ ID NO: 922 - RNA, 76 nt, synthetic construct; identical to SEQ ID NO: 652
  misc_feature 1..76: note = Description of sequence: tRNA-based effector molecule
  source 1..76: mol_type = other RNA
  modified_base 1: mod_base = gm
  modified_base 2: mod_base = gm
  modified_base 3: mod_base = cm
  modified_base 4: mod_base = cm
  modified_base 5: mod_base = cm
  modified_base 6: mod_base = cm
  modified_base 16: mod_base = um
  modified_base 17: mod_base = gm
  modified_base 18: mod_base = gm
  modified_base 20: mod_base = um
  modified_base 25: mod_base = cm
  modified_base 33: mod_base = OTHER; note = 2'-fluoro-uracil
  modified_base 41: mod_base = OTHER; note = 2'-fluoro-cytosine
  modified_base 42: mod_base = OTHER; note = 2'-O-methyladenine
  modified_base 43: mod_base = OTHER; note = 2'-O-methyladenine
  modified_base 44: mod_base = OTHER; note = 2'-fluoro-adenine
  modified_base 49: mod_base = cm
  modified_base 50: mod_base = cm
  modified_base 52: mod_base = gm
  modified_base 54: mod_base = um
  modified_base 56: mod_base = cm
  modified_base 57: mod_base = OTHER; note = 2'-fluoro-guanine
  modified_base 59: mod_base = gm
  modified_base 61: mod_base = cm
  modified_base 62: mod_base = cm
  modified_base 63: mod_base = OTHER; note = 2'-fluoro-cytosine
  modified_base 64: mod_base = gm
  modified_base 65: mod_base = gm
  modified_base 73: mod_base = gm

SEQ ID NO: 923 - RNA, 76 nt, synthetic construct; identical to SEQ ID NO: 802
  misc_feature 1..76: note = Description of sequence: tRNA-based effector molecule
  source 1..76: mol_type = other RNA
  modified_base 1: mod_base = gm
  modified_base 2: mod_base = gm
  modified_base 3: mod_base = cm
  modified_base 4: mod_base = cm
  modified_base 5: mod_base = cm
  modified_base 6: mod_base = cm
  modified_base 16: mod_base = um
  modified_base 17: mod_base = gm
  modified_base 18: mod_base = gm
  modified_base 20: mod_base = um
  modified_base 25: mod_base = cm
  modified_base 33: mod_base = OTHER; note = 2'-fluoro-uracil
  modified_base 41: mod_base = OTHER; note = 2'-fluoro-cytosine
  modified_base 42: mod_base = OTHER; note = 2'-O-methyladenine
  modified_base 43: mod_base = OTHER; note = 2'-O-methyladenine
  modified_base 44: mod_base = OTHER; note = 2'-fluoro-adenine
  modified_base 49: mod_base = gm
  modified_base 50: mod_base = cm
  modified_base 52: mod_base = gm
  modified_base 54: mod_base = um
  modified_base 56: mod_base = cm
  modified_base 57: mod_base = OTHER; note = 2'-fluoro-guanine
  modified_base 59: mod_base = gm
  modified_base 61: mod_base = cm
  modified_base 62: mod_base = cm
  modified_base 63: mod_base = OTHER; note = 2'-fluoro-cytosine
  modified_base 64: mod_base = gm
  modified_base 65: mod_base = cm
  modified_base 73: mod_base = gm

SEQ ID NO: 924 - RNA, 76 nt, synthetic construct; identical to SEQ ID NO: 702
  misc_feature 1..76: note = Description of sequence: tRNA-based effector molecule
  source 1..76: mol_type = other RNA
  modified_base 1: mod_base = gm
  modified_base 2: mod_base = gm
  modified_base 3: mod_base = cm
  modified_base 4: mod_base = um
  modified_base 5: mod_base = cm
  modified_base 6: mod_base = cm
  modified_base 16: mod_base = um
  modified_base 17: mod_base = gm
  modified_base 18: mod_base = gm
  modified_base 20: mod_base = um
  modified_base 25: mod_base = cm
  modified_base 33: mod_base = OTHER; note = 2'-fluoro-uracil
  modified_base 41: mod_base = OTHER; note = 2'-fluoro-guanine
  modified_base 42: mod_base = gm
  modified_base 43: mod_base = um
  modified_base 44: mod_base = OTHER; note = 2'-fluoro-adenine
  modified_base 49: mod_base = cm
  modified_base 50: mod_base = cm
  modified_base 52: mod_base = gm
  modified_base 54: mod_base = um
  modified_base 56: mod_base = cm
  modified_base 57: mod_base = OTHER; note = 2'-fluoro-guanine
  modified_base 59: mod_base = gm
  modified_base 61: mod_base = cm
  modified_base 62: mod_base = cm
  modified_base 63: mod_base = OTHER; note = 2'-fluoro-cytosine
  modified_base 64: mod_base = gm
  modified_base 65: mod_base = gm
  modified_base 73: mod_base = gm

SEQ ID NO: 925 - RNA, 76 nt, synthetic construct; identical to SEQ ID NO: 710
  misc_feature 1..76: note = Description of sequence: tRNA-based effector molecule
  source 1..76: mol_type = other RNA
  modified_base 1: mod_base = gm
  modified_base 2: mod_base = gm
  modified_base 3: mod_base = cm
  modified_base 4: mod_base = um
  modified_base 5: mod_base = cm
  modified_base 6: mod_base = cm
  modified_base 16: mod_base = um
  modified_base 17: mod_base = gm
  modified_base 18: mod_base = gm
  modified_base 20: mod_base = um
  modified_base 25: mod_base = cm
  modified_base 33: mod_base = OTHER; note = 2'-fluoro-uracil
  modified_base 41: mod_base = OTHER; note = 2'-fluoro-cytosine
  modified_base 42: mod_base = gm
  modified_base 43: mod_base = OTHER; note = 2'-O-methyladenine
  modified_base 44: mod_base = OTHER; note = 2'-fluoro-adenine
  modified_base 49: mod_base = cm
  modified_base 50: mod_base = cm
  modified_base 52: mod_base = gm
  modified_base 54: mod_base = um
  modified_base 56: mod_base = cm
  modified_base 57: mod_base = OTHER; note = 2'-fluoro-guanine
  modified_base 59: mod_base = gm
  modified_base 61: mod_base = cm
  modified_base 62: mod_base = cm
  modified_base 63: mod_base = OTHER; note = 2'-fluoro-cytosine
  modified_base 64: mod_base = gm
  modified_base 65: mod_base = gm
  modified_base 73: mod_base = gm

SEQ ID NO: 926 - RNA, 76 nt, synthetic construct; identical to SEQ ID NO: 805
  misc_feature 1..76: note = Description of sequence: tRNA-based effector molecule
  source 1..76: mol_type = other RNA
  modified_base 1: mod_base = gm
  modified_base 2: mod_base = gm
  modified_base 3: mod_base = cm
  modified_base 4: mod_base = um
  modified_base 5: mod_base = cm
  modified_base 6: mod_base = cm
  modified_base 16: mod_base = um
  modified_base 17: mod_base = gm
  modified_base 18: mod_base = gm
  modified_base 20: mod_base = um
  modified_base 25: mod_base = cm
  modified_base 33: mod_base = OTHER; note = 2'-fluoro-uracil
  modified_base 41: mod_base = OTHER; note = 2'-fluoro-cytosine
  modified_base 42: mod_base = OTHER; note = 2'-O-methyladenine
  modified_base 43: mod_base = OTHER; note = 2'-O-methyladenine
  modified_base 44: mod_base = OTHER; note = 2'-fluoro-adenine
  modified_base 49: mod_base = gm
  modified_base 50: mod_base = cm
  modified_base 52: mod_base = gm
  modified_base 54: mod_base = um
  modified_base 56: mod_base = cm
  modified_base 57: mod_base = OTHER; note = 2'-fluoro-guanine
  modified_base 59: mod_base = gm
  modified_base 61: mod_base = cm
  modified_base 62: mod_base = cm
  modified_base 63: mod_base = OTHER; note = 2'-fluoro-cytosine
  modified_base 64: mod_base = gm
  modified_base 65: mod_base = cm
  modified_base 73: mod_base = gm

SEQ ID NO: 927 - RNA, 76 nt, synthetic construct; identical to SEQ ID NO: 743
  misc_feature 1..76: note = Description of sequence: tRNA-based effector molecule
  source 1..76: mol_type = other RNA
  modified_base 1: mod_base = gm
  modified_base 2: mod_base = gm
  modified_base 3: mod_base = cm
  modified_base 4: mod_base = um
  modified_base 5: mod_base = cm
  modified_base 6: mod_base = cm
  modified_base 16: mod_base = um
  modified_base 17: mod_base = gm
  modified_base 18: mod_base = gm
  modified_base 20: mod_base = um
  modified_base 25: mod_base = cm
  modified_base 33: mod_base = OTHER; note = 2'-fluoro-uracil
  modified_base 41: mod_base = OTHER; note = 2'-fluoro-cytosine
  modified_base 42: mod_base = OTHER; note = 2'-O-methyladenine
  modified_base 43: mod_base = OTHER; note = 2'-O-methyladenine
  modified_base 44: mod_base = OTHER; note = 2'-fluoro-guanine
  modified_base 49: mod_base = cm
  modified_base 50: mod_base = cm
  modified_base 52: mod_base = gm
  modified_base 54: mod_base = um
  modified_base 56: mod_base = cm
  modified_base 57: mod_base = OTHER; note = 2'-fluoro-guanine
  modified_base 59: mod_base = gm
  modified_base 61: mod_base = cm
  modified_base 62: mod_base = cm
  modified_base 63: mod_base = OTHER; note = 2'-fluoro-cytosine
  modified_base 64: mod_base = gm
  modified_base 65: mod_base = gm
  modified_base 73: mod_base = gm

SEQ ID NO: 928 - RNA, 76 nt, synthetic construct; identical to SEQ ID NO: 794
  misc_feature 1..76: note = Description of sequence: tRNA-based effector molecule
  source 1..76: mol_type = other RNA
  modified_base 1: mod_base = um
  modified_base 2: mod_base = OTHER; note = 2'-O-methyladenine
  modified_base 3: mod_base = cm
  modified_base 4: mod_base = OTHER; note = 2'-O-methyladenine
  modified_base 5: mod_base = cm
  modified_base 6: mod_base = cm
  modified_base 16: mod_base = um
  modified_base 17: mod_base = gm
  modified_base 18: mod_base = gm
  modified_base 20: mod_base = um
  modified_base 25: mod_base = cm
  modified_base 33: mod_base = OTHER; note = 2'-fluoro-uracil
  modified_base 41: mod_base = OTHER; note = 2'-fluoro-cytosine
  modified_base 42: mod_base = OTHER; note = 2'-O-methyladenine
  modified_base 43: mod_base = OTHER; note = 2'-O-methyladenine
  modified_base 44: mod_base = OTHER; note = 2'-fluoro-adenine
  modified_base 49: mod_base = cm
  modified_base 50: mod_base = cm
  modified_base 52: mod_base = gm
  modified_base 54: mod_base = um
  modified_base 56: mod_base = cm
  modified_base 57: mod_base = OTHER; note = 2'-fluoro-guanine
  modified_base 59: mod_base = gm
  modified_base 61: mod_base = cm
  modified_base 62: mod_base = cm
  modified_base 63: mod_base = OTHER; note = 2'-fluoro-cytosine
  modified_base 64: mod_base = gm
  modified_base 65: mod_base = gm
  modified_base 73: mod_base = gm

SEQ ID NO: 929 - RNA, 76 nt, synthetic construct; identical to SEQ ID NO: 627
  misc_feature 1..76: note = Description of sequence: tRNA-based effector molecule
  source 1..76: mol_type = other RNA
  modified_base 1: mod_base = OTHER; note = 2'-O-methyladenine
  modified_base 2: mod_base = cm
  modified_base 3: mod_base = cm
  modified_base 4: mod_base = OTHER; note = 2'-O-methyladenine
  modified_base 5: mod_base = OTHER; note = 2'-O-methyladenine
  modified_base 6: mod_base = cm
  modified_base 16: mod_base = um
  modified_base 17: mod_base = gm
  modified_base 18: mod_base = gm
  modified_base 20: mod_base = um
  modified_base 22: mod_base = gm
  modified_base 23: mod_base = cm
  modified_base 24: mod_base = gm
  modified_base 25: mod_base = cm
  modified_base 33: mod_base = OTHER; note = 2'-fluoro-uracil
  modified_base 41: mod_base = cm
  modified_base 42: mod_base = OTHER; note = 2'-O-methyladenine
  modified_base 43: mod_base = OTHER; note = 2'-O-methyladenine
  modified_base 44: mod_base = OTHER; note = 2'-O-methyladenine
  modified_base 45: mod_base = gm
  modified_base 46: mod_base = OTHER; note = 2'-fluoro-guanine
  modified_base 48: mod_base = OTHER; note = 2'-fluoro-uracil
  modified_base 49: mod_base = cm
  modified_base 50: mod_base = cm
  modified_base 52: mod_base = gm
  modified_base 54: mod_base = um
  modified_base 56: mod_base = cm
  modified_base 57: mod_base = OTHER; note = 2'-fluoro-guanine
  modified_base 59: mod_base = gm
  modified_base 61: mod_base = cm
  modified_base 65: mod_base = gm
  modified_base 73: mod_base = gm

SEQ ID NO: 930 - RNA, 76 nt, synthetic construct; identical to SEQ ID NO: 639
  misc_feature 1..76: note = Description of sequence: tRNA-based effector molecule
  source 1..76: mol_type = other RNA
  modified_base 1: mod_base = gm
  modified_base 2: mod_base = cm
  modified_base 3: mod_base = cm
  modified_base 4: mod_base = cm
  modified_base 5: mod_base = gm
  modified_base 6: mod_base = OTHER; note = 2'-O-methyladenine
  modified_base 16: mod_base = um
  modified_base 17: mod_base = gm
  modified_base 18: mod_base = gm
  modified_base 20: mod_base = um
  modified_base 22: mod_base = gm
  modified_base 23: mod_base = cm
  modified_base 24: mod_base = gm
  modified_base 25: mod_base = cm
  modified_base 33: mod_base = OTHER; note = 2'-fluoro-uracil
  modified_base 41: mod_base = cm
  modified_base 42: mod_base = OTHER; note = 2'-O-methyladenine
  modified_base 43: mod_base = OTHER; note = 2'-O-methyladenine
  modified_base 44: mod_base = OTHER; note = 2'-O-methyladenine
  modified_base 45: mod_base = gm
  modified_base 46: mod_base = OTHER; note = 2'-fluoro-guanine
  modified_base 48: mod_base = OTHER; note = 2'-fluoro-uracil
  modified_base 49: mod_base = cm
  modified_base 50: mod_base = cm
  modified_base 52: mod_base = gm
  modified_base 54: mod_base = um
  modified_base 56: mod_base = cm
  modified_base 57: mod_base = OTHER; note = 2'-fluoro-guanine
  modified_base 59: mod_base = gm
  modified_base 61: mod_base = cm
  modified_base 65: mod_base = gm
  modified_base 73: mod_base = gm

SEQ ID NO: 931 - RNA, 76 nt, synthetic construct; identical to SEQ ID NO: 799
  misc_feature 1..76: note = Description of sequence: tRNA-based effector molecule
  source 1..76: mol_type = other RNA
  modified_base 1: mod_base = gm
  modified_base 2: mod_base = cm
  modified_base 3: mod_base = cm
  modified_base 4: mod_base = um
  modified_base 5: mod_base = cm
  modified_base 6: mod_base = cm
  modified_base 16: mod_base = um
  modified_base 17: mod_base = gm
  modified_base 18: mod_base = gm
  modified_base 20: mod_base = um
  modified_base 22: mod_base = OTHER; note = 2'-O-methyladenine
  modified_base 23: mod_base = gm
  modified_base 24: mod_base = gm
  modified_base 25: mod_base = cm
  modified_base 33: mod_base = OTHER; note = 2'-fluoro-uracil
  modified_base 41: mod_base = cm
  modified_base 42: mod_base = gm
  modified_base 43: mod_base = gm
  modified_base 44: mod_base = gm
  modified_base 45: mod_base = gm
  modified_base 46: mod_base = OTHER; note = 2'-fluoro-adenine
  modified_base 48: mod_base = OTHER; note = 2'-fluoro-uracil
  modified_base 49: mod_base = gm
  modified_base 50: mod_base = cm
  modified_base 52: mod_base = gm
  modified_base 54: mod_base = um
  modified_base 56: mod_base = cm
  modified_base 57: mod_base = OTHER; note = 2'-fluoro-guanine
  modified_base 59: mod_base = gm
  modified_base 61: mod_base = cm
  modified_base 65: mod_base = um
  modified_base 73: mod_base = gm

SEQ ID NO: 932 - RNA, 76 nt, synthetic construct; identical to SEQ ID NO: 641
  misc_feature 1..76: note = Description of sequence: tRNA-based effector molecule
  source 1..76: mol_type = other RNA
  modified_base 1: mod_base = gm
  modified_base 2: mod_base = cm
  modified_base 3: mod_base = cm
  modified_base 4: mod_base = um
  modified_base 5: mod_base = cm
  modified_base 6: mod_base = cm
  modified_base 16: mod_base = um
  modified_base 17: mod_base = gm
  modified_base 18: mod_base = gm
  modified_base 20: mod_base = um
  modified_base 22: mod_base = gm
  modified_base 23: mod_base = cm
  modified_base 24: mod_base = gm
  modified_base 25: mod_base = cm
  modified_base 33: mod_base = OTHER; note = 2'-fluoro-uracil
  modified_base 41: mod_base = cm
  modified_base 42: mod_base = OTHER; note = 2'-O-methyladenine
  modified_base 43: mod_base = cm
  modified_base 44: mod_base = OTHER; note = 2'-O-methyladenine
  modified_base 45: mod_base = gm
  modified_base 46: mod_base = OTHER; note = 2'-fluoro-guanine
  modified_base 48: mod_base = OTHER; note = 2'-fluoro-uracil
  modified_base 49: mod_base = cm
  modified_base 50: mod_base = cm
  modified_base 52: mod_base = gm
  modified_base 54: mod_base = um
  modified_base 56: mod_base = cm
  modified_base 57: mod_base = OTHER; note = 2'-fluoro-guanine
  modified_base 59: mod_base = gm
  modified_base 61: mod_base = cm
  modified_base 65: mod_base = gm
  modified_base 73: mod_base = gm

SEQ ID NO: 933 - RNA, 76 nt, synthetic construct; identical to SEQ ID NO: 652
  misc_feature 1..76: note = Description of sequence: tRNA-based effector molecule
  source 1..76: mol_type = other RNA
  modified_base 1: mod_base = gm
  modified_base 2: mod_base = gm
  modified_base 3: mod_base = cm
  modified_base 4: mod_base = cm
  modified_base 5: mod_base = cm
  modified_base 6: mod_base = cm
  modified_base 16: mod_base = um
  modified_base 17: mod_base = gm
  modified_base 18: mod_base = gm
  modified_base 20: mod_base = um
  modified_base 22: mod_base = gm
  modified_base 23: mod_base = cm
  modified_base 24: mod_base = gm
  modified_base 25: mod_base = cm
  modified_base 33: mod_base = OTHER; note = 2'-fluoro-uracil
  modified_base 41: mod_base = cm
  modified_base 42: mod_base = OTHER; note = 2'-O-methyladenine
  modified_base 43: mod_base = OTHER; note = 2'-O-methyladenine
  modified_base 44: mod_base = OTHER; note = 2'-O-methyladenine
  modified_base 45: mod_base = gm
  modified_base 46: mod_base = OTHER; note = 2'-fluoro-guanine
  modified_base 48: mod_base = OTHER; note = 2'-fluoro-uracil
  modified_base 49: mod_base = cm
  modified_base 50: mod_base = cm
  modified_base 52: mod_base = gm
  modified_base 54: mod_base = um
  modified_base 56: mod_base = cm
  modified_base 57: mod_base = OTHER; note = 2'-fluoro-guanine
  modified_base 59: mod_base = gm
  modified_base 61: mod_base = cm
  modified_base 65: mod_base = gm
  modified_base 73: mod_base = gm

SEQ ID NO: 934 - RNA, 76 nt, synthetic construct; identical to SEQ ID NO: 802
  misc_feature 1..76: note = Description of sequence: tRNA-based effector molecule
  source 1..76: mol_type = other RNA
  modified_base 1: mod_base = gm
  modified_base 2: mod_base = gm
  modified_base 3: mod_base = cm
  modified_base 4: mod_base = cm
  modified_base 5: mod_base = cm
  modified_base 6: mod_base = cm
  modified_base 16: mod_base = um
  modified_base 17: mod_base = gm
  modified_base 18: mod_base = gm
  modified_base 20: mod_base = um
  modified_base 22: mod_base = gm
  modified_base 23: mod_base = cm
  modified_base 24: mod_base = gm
  modified_base 25: mod_base = cm
  modified_base 33: mod_base = OTHER; note = 2'-fluoro-uracil
  modified_base 41: mod_base = cm
  modified_base 42: mod_base = OTHER; note = 2'-O-methyladenine
  modified_base 43: mod_base = OTHER; note = 2'-O-methyladenine
  modified_base 44: mod_base = OTHER; note = 2'-O-methyladenine
  modified_base 45: mod_base = gm
  modified_base 46: mod_base = OTHER; note = 2'-fluoro-guanine
  modified_base 48: mod_base = OTHER; note = 2'-fluoro-uracil
  modified_base 49: mod_base = gm
  modified_base 50: mod_base = cm
  modified_base 52: mod_base = gm
  modified_base 54: mod_base = um
  modified_base 56: mod_base = cm
  modified_base 57: mod_base = OTHER; note = 2'-fluoro-guanine
  modified_base 59: mod_base = gm
  modified_base 61: mod_base = cm
  modified_base 65: mod_base = cm
  modified_base 73: mod_base = gm

SEQ ID NO: 935 - RNA, 76 nt, synthetic construct; identical to SEQ ID NO: 702
  misc_feature 1..76: note = Description of sequence: tRNA-based effector molecule
  source 1..76: mol_type = other RNA
  modified_base 1: mod_base = gm
  modified_base 2: mod_base = gm
  modified_base 3: mod_base = cm
  modified_base 4: mod_base = um
  modified_base 5: mod_base = cm
  modified_base 6: mod_base = cm
  modified_base 16: mod_base = um
  modified_base 17: mod_base = gm
  modified_base 18: mod_base = gm
  modified_base 20: mod_base = um
  modified_base 22: mod_base = gm
  modified_base 23: mod_base = cm
  modified_base 24: mod_base = gm
  modified_base 25: mod_base = cm
  modified_base 33: mod_base = OTHER; note = 2'-fluoro-uracil
  modified_base 41: mod_base = gm
  modified_base 42: mod_base = gm
  modified_base 43: mod_base = um
  modified_base 44: mod_base = OTHER; note = 2'-O-methyladenine
  modified_base 45: mod_base = gm
  modified_base 46: mod_base = OTHER; note = 2'-fluoro-guanine
  modified_base 48: mod_base = OTHER; note = 2'-fluoro-uracil
  modified_base 49: mod_base = cm
  modified_base 50: mod_base = cm
  modified_base 52: mod_base = gm
  modified_base 54: mod_base = um
  modified_base 56: mod_base = cm
  modified_base 57: mod_base = OTHER; note = 2'-fluoro-guanine
  modified_base 59: mod_base = gm
  modified_base 61: mod_base = cm
  modified_base 65: mod_base = gm
  modified_base 73: mod_base = gm

SEQ ID NO: 936 - RNA, 76 nt, synthetic construct; identical to SEQ ID NO: 710
  misc_feature 1..76: note = Description of sequence: tRNA-based effector molecule
  source 1..76: mol_type = other RNA
  modified_base 1: mod_base = gm
  modified_base 2: mod_base = gm
  modified_base 3: mod_base = cm
  modified_base 4: mod_base = um
  modified_base 5: mod_base = cm
  modified_base 6: mod_base = cm
  modified_base 16: mod_base = um
  modified_base 17: mod_base = gm
  modified_base 18: mod_base = gm
  modified_base 20: mod_base = um
  modified_base 22: mod_base = gm
  modified_base 23: mod_base = cm
  modified_base 24: mod_base = gm
  modified_base 25: mod_base = cm
  modified_base 33: mod_base = OTHER; note = 2'-fluoro-uracil
  modified_base 41: mod_base = cm
  modified_base 42: mod_base = gm
  modified_base 43: mod_base = OTHER; note = 2'-O-methyladenine
  modified_base 44: mod_base = OTHER; note = 2'-O-methyladenine
  modified_base 45: mod_base = gm
  modified_base 46: mod_base = OTHER; note = 2'-fluoro-guanine
  modified_base 48: mod_base = OTHER; note = 2'-fluoro-uracil
  modified_base 49: mod_base = cm
  modified_base 50: mod_base = cm
  modified_base 52: mod_base = gm
  modified_base 54: mod_base = um
  modified_base 56: mod_base = cm
  modified_base 57: mod_base = OTHER; note = 2'-fluoro-guanine
  modified_base 59: mod_base = gm
  modified_base 61: mod_base = cm
  modified_base 65: mod_base = gm
  modified_base 73: mod_base = gm

SEQ ID NO: 937 - RNA, 76 nt, synthetic construct; identical to SEQ ID NO: 805
  misc_feature 1..76: note = Description of sequence: tRNA-based effector molecule
  source 1..76: mol_type = other RNA
  modified_base 1: mod_base = gm
  modified_base 2: mod_base = gm
  modified_base 3: mod_base = cm
  modified_base 4: mod_base = um
  modified_base 5: mod_base = cm
  modified_base 6: mod_base = cm
  modified_base 16: mod_base = um
  modified_base 17: mod_base = gm
  modified_base 18: mod_base = gm
  modified_base 20: mod_base = um
  modified_base 22: mod_base = gm
  modified_base 23: mod_base = cm
  modified_base 24: mod_base = gm
  modified_base 25: mod_base = cm
  modified_base 33: mod_base = OTHER; note = 2'-fluoro-uracil
  modified_base 41: mod_base = cm
  modified_base 42: mod_base = OTHER; note = 2'-O-methyladenine
  modified_base 43: mod_base = OTHER; note = 2'-O-methyladenine
  modified_base 44: mod_base = OTHER; note = 2'-O-methyladenine
  modified_base 45: mod_base = gm
  modified_base 46: mod_base = OTHER; note = 2'-fluoro-guanine
  modified_base 48: mod_base = OTHER; note = 2'-fluoro-uracil
  modified_base 49: mod_base = gm
  modified_base 50: mod_base = cm
  modified_base 52: mod_base = gm
  modified_base 54: mod_base = um
  modified_base 56: mod_base = cm
  modified_base 57: mod_base = OTHER; note = 2'-fluoro-guanine
  modified_base 59: mod_base = gm
  modified_base 61: mod_base = cm
  modified_base 65: mod_base = cm
  modified_base 73: mod_base = gm

SEQ ID NO: 938 - RNA, 76 nt, synthetic construct; identical to SEQ ID NO: 743
  misc_feature 1..76: note = Description of sequence: tRNA-based effector molecule
  source 1..76: mol_type = other RNA
  modified_base 1: mod_base = gm
  modified_base 2: mod_base = gm
  modified_base 3: mod_base = cm
  modified_base 4: mod_base = um
  modified_base 5: mod_base = cm
  modified_base 6: mod_base = cm
  modified_base 16: mod_base = um
  modified_base 17: mod_base = gm
  modified_base 18: mod_base = gm
  modified_base 20: mod_base = um
  modified_base 22: mod_base = gm
  modified_base 23: mod_base = cm
  modified_base 24: mod_base = gm
  modified_base 25: mod_base = cm
  modified_base 33: mod_base = OTHER; note = 2'-fluoro-uracil
  modified_base 41: mod_base = cm
  modified_base 42: mod_base = OTHER; note = 2'-O-methyladenine
  modified_base 43: mod_base = OTHER; note = 2'-O-methyladenine
  modified_base 44: mod_base = gm
  modified_base 45: mod_base = gm
  modified_base 46: mod_base = OTHER; note = 2'-fluoro-guanine
  modified_base 48: mod_base = OTHER; note = 2'-fluoro-uracil
  modified_base 49: mod_base = cm
  modified_base 50: mod_base = cm
  modified_base 52: mod_base = gm
  modified_base 54: mod_base = um
  modified_base 56: mod_base = cm
  modified_base 57: mod_base = OTHER; note = 2'-fluoro-guanine
  modified_base 59: mod_base = gm
  modified_base 61: mod_base = cm
  modified_base 65: mod_base = gm
  modified_base 73: mod_base = gm

SEQ ID NO: 939 - RNA, 76 nt, synthetic construct; identical to SEQ ID NO: 794
  misc_feature 1..76: note = Description of sequence: tRNA-based effector molecule
  source 1..76: mol_type = other RNA
  modified_base 1: mod_base = um
  modified_base 2: mod_base = OTHER; note = 2'-O-methyladenine
  modified_base 3: mod_base = cm
  modified_base 4: mod_base = OTHER; note = 2'-O-methyladenine
  modified_base 5: mod_base = cm
  modified_base 6: mod_base = cm
  modified_base 16: mod_base = um
  modified_base 17: mod_base = gm
  modified_base 18: mod_base = gm
  modified_base 20: mod_base = um
  modified_base 22: mod_base = gm
  modified_base 23: mod_base = cm
  modified_base 24: mod_base = gm
  modified_base 25: mod_base = cm
  modified_base 33: mod_base = OTHER; note = 2'-fluoro-uracil
  modified_base 41: mod_base = cm
  modified_base 42: mod_base = OTHER; note = 2'-O-methyladenine
  modified_base 43: mod_base = OTHER; note = 2'-O-methyladenine
  modified_base 44: mod_base = OTHER; note = 2'-O-methyladenine
  modified_base 45: mod_base = gm
  modified_base 46: mod_base = OTHER; note = 2'-fluoro-guanine
  modified_base 48: mod_base = OTHER; note = 2'-fluoro-uracil
  modified_base 49: mod_base = cm
  modified_base 50: mod_base = cm
  modified_base 52: mod_base = gm
  modified_base 54: mod_base = um
  modified_base 56: mod_base = cm
  modified_base 57: mod_base = OTHER; note = 2'-fluoro-guanine
  modified_base 59: mod_base = gm
  modified_base 61: mod_base = cm
  modified_base 65: mod_base = gm
  modified_base 73: mod_base = gm

SEQ ID NO: 940 - RNA, 76 nt, synthetic construct; identical to SEQ ID NO: 627
  misc_feature 1..76: note = Description of sequence: tRNA-based effector molecule
  source 1..76: mol_type = other RNA
  modified_base 1: mod_base = OTHER; note = 2'-O-methyladenine
  modified_base 2: mod_base = cm
  modified_base 3: mod_base = cm
  modified_base 4: mod_base = OTHER; note = 2'-O-methyladenine
  modified_base 5: mod_base = OTHER; note = 2'-O-methyladenine
  modified_base 6: mod_base = cm
  modified_base 14: mod_base = OTHER; note = 2'-O-methyladenine
  modified_base 17: mod_base = gm
  modified_base 18: mod_base = gm
  modified_base 20: mod_base = um
  modified_base 22: mod_base = gm
  modified_base 25: mod_base = cm
  modified_base 27: mod_base = um
  modified_base 33: mod_base = OTHER; note = 2'-fluoro-uracil
  modified_base 71: mod_base = gm
  modified_base 73: mod_base = gm

SEQ ID NO: 941 - RNA, 76 nt, synthetic construct; identical to SEQ ID NO: 639
  misc_feature 1..76: note = Description of sequence: tRNA-based effector molecule
  source 1..76: mol_type = other RNA
  modified_base 1: mod_base = gm
  modified_base 2: mod_base = cm
  modified_base 3: mod_base = cm
  modified_base 4: mod_base = cm
  modified_base 5: mod_base = gm
  modified_base 6: mod_base = OTHER; note = 2'-O-methyladenine
  modified_base 14: mod_base = OTHER; note = 2'-O-methyladenine
  modified_base 17: mod_base = gm
  modified_base 18: mod_base = gm
  modified_base 20: mod_base = um
  modified_base 22: mod_base = gm
  modified_base 25: mod_base = cm
  modified_base 27: mod_base = um
  modified_base 33: mod_base = OTHER; note = 2'-fluoro-uracil
  modified_base 71: mod_base = gm
  modified_base 73: mod_base = gm

SEQ ID NO: 942 - RNA, 76 nt, synthetic construct; identical to SEQ ID NO: 799
  misc_feature 1..76: note = Description of sequence: tRNA-based effector molecule
  source 1..76: mol_type = other RNA
  modified_base 1: mod_base = gm
  modified_base 2: mod_base = cm
  modified_base 3: mod_base = cm
  modified_base 4: mod_base = um
  modified_base 5: mod_base = cm
  modified_base 6: mod_base = cm
  modified_base 14: mod_base = OTHER; note = 2'-O-methyladenine
  modified_base 17: mod_base = gm
  modified_base 18: mod_base = gm
  modified_base 20: mod_base = um
  modified_base 22: mod_base = OTHER; note = 2'-O-methyladenine
  modified_base 25: mod_base = cm
  modified_base 27: mod_base = um
  modified_base 33: mod_base = OTHER; note = 2'-fluoro-uracil
  modified_base 71: mod_base = gm
  modified_base 73: mod_base = gm

SEQ ID NO: 943 - RNA, 76 nt, synthetic construct; identical to SEQ ID NO: 641
  misc_feature 1..76: note = Description of sequence: tRNA-based effector molecule
  source 1..76: mol_type = other RNA
  modified_base 1: mod_base = gm
  modified_base 2: mod_base = cm
  modified_base 3: mod_base = cm
  modified_base 4: mod_base = um
  modified_base 5: mod_base = cm
  modified_base 6: mod_base = cm
  modified_base 14: mod_base = OTHER; note = 2'-O-methyladenine
  modified_base 17: mod_base = gm
  modified_base 18: mod_base = gm
  modified_base 20: mod_base = um
  modified_base 22: mod_base = gm
  modified_base 25: mod_base = cm
  modified_base 27: mod_base = gm
  modified_base 33: mod_base = OTHER; note = 2'-fluoro-uracil
  modified_base 71: mod_base = gm
  modified_base 73: mod_base = gm

SEQ ID NO: 944 - RNA, 76 nt, synthetic construct; identical to SEQ ID NO: 652
  misc_feature 1..76: note = Description of sequence: tRNA-based effector molecule
  source 1..76: mol_type = other RNA
  modified_base 1: mod_base = gm
  modified_base 2: mod_base = gm
  modified_base 3: mod_base = cm
  modified_base 4: mod_base = cm
  modified_base 5: mod_base = cm
  modified_base 6: mod_base = cm
  modified_base 14: mod_base = OTHER; note = 2'-O-methyladenine
  modified_base 17: mod_base = gm
  modified_base 18: mod_base = gm
  modified_base 20: mod_base = um
  modified_base 22: mod_base = gm
  modified_base 25: mod_base = cm
  modified_base 27: mod_base = um
  modified_base 33: mod_base = OTHER; note = 2'-fluoro-uracil
  modified_base 71: mod_base = um
  modified_base 73: mod_base = gm

SEQ ID NO: 945 - RNA, 76 nt, synthetic construct; identical to SEQ ID NO: 802
  misc_feature 1..76: note = Description of sequence: tRNA-based effector molecule
  source 1..76: mol_type = other RNA
  modified_base 1: mod_base = gm
  modified_base 2: mod_base = gm
  modified_base 3: mod_base = cm
  modified_base 4: mod_base = cm
  modified_base 5: mod_base = cm
  modified_base 6: mod_base = cm
  modified_base 14: mod_base = OTHER; note = 2'-O-methyladenine
  modified_base 17: mod_base = gm
  modified_base 18: mod_base = gm
  modified_base 20: mod_base = um
  modified_base 22: mod_base = gm
  modified_base 25: mod_base = cm
  modified_base 27: mod_base = um
  modified_base 33: mod_base = OTHER; note = 2'-fluoro-uracil
  modified_base 71: mod_base = um
  modified_base 73: mod_base = gm

SEQ ID NO: 946 - RNA, 76 nt, synthetic construct; identical to SEQ ID NO: 702
  misc_feature 1..76: note = Description of sequence: tRNA-based effector molecule
  source 1..76: mol_type = other RNA
  modified_base 1: mod_base = gm
  modified_base 2: mod_base = gm
  modified_base 3: mod_base = cm
  modified_base 4: mod_base = um
  modified_base 5: mod_base = cm
  modified_base 6: mod_base = cm
  modified_base 14: mod_base = OTHER; note = 2'-O-methyladenine
  modified_base 17: mod_base = gm
  modified_base 18: mod_base = gm
  modified_base 20: mod_base = um
  modified_base 22: mod_base = gm
  modified_base 25: mod_base = cm
  modified_base 27: mod_base = OTHER; note = 2'-O-methyladenine
  modified_base 33: mod_base = OTHER; note = 2'-fluoro-uracil
  modified_base 71: mod_base = um
  modified_base 73: mod_base = gm

SEQ ID NO: 947 - RNA, 76 nt, synthetic construct; identical to SEQ ID NO: 710
  misc_feature 1..76: note = Description of sequence: tRNA-based effector molecule
  source 1..76: mol_type = other RNA
  modified_base 1: mod_base = gm
  modified_base 2: mod_base = gm
  modified_base 3: mod_base = cm
  modified_base 4: mod_base = um
  modified_base 5: mod_base = cm
  modified_base 6: mod_base = cm
  modified_base 14: mod_base = OTHER; note = 2'-O-methyladenine
  modified_base 17: mod_base = gm
  modified_base 18: mod_base = gm
  modified_base 20: mod_base = um
  modified_base 22: mod_base = gm
  modified_base 25: mod_base = cm
  modified_base 27: mod_base = um
  modified_base 33: mod_base = OTHER; note = 2'-fluoro-uracil
  modified_base 71: mod_base = um
  modified_base 73: mod_base = gm

SEQ ID NO: 948 - RNA, 76 nt, synthetic construct; identical to SEQ ID NO: 805
  misc_feature 1..76: note = Description of sequence: tRNA-based effector molecule
  source 1..76: mol_type = other RNA
  modified_base 1: mod_base = gm
  modified_base 2: mod_base = gm
  modified_base 3: mod_base = cm
  modified_base 4: mod_base = um
  modified_base 5: mod_base = cm
  modified_base 6: mod_base = cm
  modified_base 14: mod_base = OTHER; note = 2'-O-methyladenine
  modified_base 17: mod_base = gm
  modified_base 18: mod_base = gm
  modified_base 20: mod_base = um
  modified_base 22: mod_base = gm
  modified_base 25: mod_base = cm
  modified_base 27: mod_base = um
  modified_base 33: mod_base = OTHER; note = 2'-fluoro-uracil
  modified_base 71: mod_base = um
  modified_base 73: mod_base = gm

SEQ ID NO: 949 - RNA, 76 nt, synthetic construct; identical to SEQ ID NO: 743
  misc_feature 1..76: note = Description of sequence: tRNA-based effector molecule
  source 1..76: mol_type = other RNA
  modified_base 1: mod_base = gm
  modified_base 2: mod_base = gm
  modified_base 3: mod_base = cm
  modified_base 4: mod_base = um
  modified_base 5: mod_base = cm
  modified_base 6: mod_base = cm
  modified_base 14: mod_base = OTHER; note = 2'-O-methyladenine
  modified_base 17: mod_base = gm
  modified_base 18: mod_base = gm
  modified_base 20: mod_base = um
  modified_base 22: mod_base = gm
  modified_base 25: mod_base = cm
  modified_base 27: mod_base = um
  modified_base 33: mod_base = OTHER; note = 2'-fluoro-uracil
  modified_base 71: mod_base = um
  modified_base 73: mod_base = gm

SEQ ID NO: 950 - RNA, 76 nt, synthetic construct; identical to SEQ ID NO: 794
  misc_feature 1..76: note = Description of sequence: tRNA-based effector molecule
  source 1..76: mol_type = other RNA
  modified_base 1: mod_base = um
  modified_base 2: mod_base = OTHER; note = 2'-O-methyladenine
  modified_base 3: mod_base = cm
  modified_base 4: mod_base = OTHER; note = 2'-O-methyladenine
  modified_base 5: mod_base = cm
  modified_base 6: mod_base = cm
  modified_base 14: mod_base = OTHER; note = 2'-O-methyladenine
  modified_base 17: mod_base = gm
  modified_base 18: mod_base = gm
  modified_base 20: mod_base = um
  modified_base 22: mod_base = gm
  modified_base 25: mod_base = cm
  modified_base 27: mod_base = um
  modified_base 33: mod_base = OTHER; note = 2'-fluoro-uracil
  modified_base 71: mod_base = um
  modified_base 73: mod_base = gm

SEQ ID NO: 951 - RNA, 76 nt, synthetic construct; identical to SEQ ID NO: 627
  misc_feature 1..76: note = Description of sequence: tRNA-based effector molecule
  source 1..76: mol_type = other RNA
  modified_base 1: mod_base = OTHER; note = 2'-O-methyladenine
  modified_base 2: mod_base = cm
  modified_base 3: mod_base = cm
  modified_base 4: mod_base = OTHER; note = 2'-O-methyladenine
  modified_base 5: mod_base = OTHER; note = 2'-O-methyladenine
  modified_base 6: mod_base = cm
  modified_base 14: mod_base = OTHER; note = 2'-O-methyladenine
  modified_base 15: mod_base = OTHER; note = 2'-O-methyladenine
  modified_base 16: mod_base = um
  modified_base 17: mod_base = gm
  modified_base 18: mod_base = gm
  modified_base 20: mod_base = um
  modified_base 25: mod_base = cm
  modified_base 41: mod_base = cm
  modified_base 42: mod_base = OTHER; note = 2'-O-methyladenine
  modified_base 43: mod_base = OTHER; note = 2'-O-methyladenine
  modified_base 44: mod_base = OTHER; note = 2'-O-methyladenine
  modified_base 49: mod_base = cm
  modified_base 50: mod_base = cm
  modified_base 52: mod_base = gm
  modified_base 54: mod_base = um
  modified_base 56: mod_base = cm
  modified_base 57: mod_base = OTHER; note = 2'-fluoro-guanine
  modified_base 59: mod_base = gm
  modified_base 61: mod_base = cm
  modified_base 65: mod_base = gm
  modified_base 73: mod_base = gm

SEQ ID NO: 952 - RNA, 76 nt, synthetic construct; identical to SEQ ID NO: 639
  misc_feature 1..76: note = Description of sequence: tRNA-based effector molecule
  source 1..76: mol_type = other RNA
  modified_base 1: mod_base = gm
  modified_base 2: mod_base = cm
  modified_base 3: mod_base = cm
  modified_base 4: mod_base = cm
  modified_base 5: mod_base = gm
  modified_base 6: mod_base = OTHER; note = 2'-O-methyladenine
  modified_base 14: mod_base = OTHER; note = 2'-O-methyladenine
  modified_base 15: mod_base = OTHER; note = 2'-O-methyladenine
  modified_base 16: mod_base = um
  modified_base 17: mod_base = gm
  modified_base 18: mod_base = gm
  modified_base 20: mod_base = um
  modified_base 25: mod_base = cm
  modified_base 41: mod_base = cm
  modified_base 42: mod_base = OTHER; note = 2'-O-methyladenine
  modified_base 43: mod_base = OTHER; note = 2'-O-methyladenine
  modified_base 44: mod_base = OTHER; note = 2'-O-methyladenine
  modified_base 49: mod_base = cm
  modified_base 50: mod_base = cm
  modified_base 52: mod_base = gm
  modified_base 54: mod_base = um
  modified_base 56: mod_base = cm
  modified_base 57: mod_base = OTHER; note = 2'-fluoro-guanine
  modified_base 59: mod_base = gm
  modified_base 61: mod_base = cm
  modified_base 65: mod_base = gm
  modified_base 73: mod_base = gm

SEQ ID NO: 953 - RNA, 76 nt, synthetic construct; identical to SEQ ID NO: 799
  misc_feature 1..76: note = Description of sequence: tRNA-based effector molecule
  source 1..76: mol_type = other RNA
  modified_base 1: mod_base = gm
  modified_base 2: mod_base = cm
  modified_base 3: mod_base = cm
  modified_base 4: mod_base = um
  modified_base 5: mod_base = cm
  modified_base 6: mod_base = cm
  modified_base 14: mod_base = OTHER; note = 2'-O-methyladenine
  modified_base 15: mod_base = OTHER; note = 2'-O-methyladenine
  modified_base 16: mod_base = um
  modified_base 17: mod_base = gm
  modified_base 18: mod_base = gm
  modified_base 20: mod_base = um
  modified_base 25: mod_base = cm
  modified_base 41: mod_base = cm
  modified_base 42: mod_base = gm
  modified_base 43: mod_base = gm
  modified_base 44: mod_base = gm
  modified_base 49: mod_base = gm
  modified_base 50: mod_base = cm
  modified_base 52: mod_base = gm
  modified_base 54: mod_base = um
  modified_base 56: mod_base = cm
  modified_base 57: mod_base = OTHER; note = 2'-fluoro-guanine
  modified_base 59: mod_base = gm
  modified_base 61: mod_base = cm
  modified_base 65: mod_base = um
  modified_base 73: mod_base = gm

SEQ ID NO: 954 - RNA, 76 nt, synthetic construct; identical to SEQ ID NO: 641
  misc_feature 1..76: note = Description of sequence: tRNA-based effector molecule
  source 1..76: mol_type = other RNA
  modified_base 1: mod_base = gm
  modified_base 2: mod_base = cm
  modified_base 3: mod_base = cm
  modified_base 4: mod_base = um
  modified_base 5: mod_base = cm
  modified_base 6: mod_base = cm
  modified_base 14: mod_base = OTHER; note = 2'-O-methyladenine
  modified_base 15: mod_base = OTHER; note = 2'-O-methyladenine
  modified_base 16: mod_base = um
  modified_base 17: mod_base = gm
  modified_base 18: mod_base = gm
  modified_base 20: mod_base = um
  modified_base 25: mod_base = cm
  modified_base 41: mod_base = cm
  modified_base 42: mod_base = OTHER; note = 2'-O-methyladenine
  modified_base 43: mod_base = cm
  modified_base 44: mod_base = OTHER; note = 2'-O-methyladenine
  modified_base 49: mod_base = cm
  modified_base 50: mod_base = cm
  modified_base 52: mod_base = gm
  modified_base 54: mod_base = um
  modified_base 56: mod_base = cm
  modified_base 57: mod_base = OTHER; note = 2'-fluoro-guanine
  modified_base 59: mod_base = gm
  modified_base 61: mod_base = cm
  modified_base 65: mod_base = gm
  modified_base 73: mod_base = gm

SEQ ID NO: 955 - RNA, 76 nt, synthetic construct; identical to SEQ ID NO: 652
  misc_feature 1..76: note = Description of sequence: tRNA-based effector molecule
  source 1..76: mol_type = other RNA
  modified_base 1: mod_base = gm
  modified_base 2: mod_base = gm
  modified_base 3: mod_base = cm
  modified_base 4: mod_base = cm
  modified_base 5: mod_base = cm
  modified_base 6: mod_base = cm
  modified_base 14: mod_base = OTHER; note = 2'-O-methyladenine
  modified_base 15: mod_base = OTHER; note = 2'-O-methyladenine
  modified_base 16: mod_base = um
  modified_base 17: mod_base = gm
  modified_base 18: mod_base = gm
  modified_base 20: mod_base = um
  modified_base 25: mod_base = cm
  modified_base 41: mod_base = cm
  modified_base 42: mod_base = OTHER; note = 2'-O-methyladenine
  modified_base 43: mod_base = OTHER; note = 2'-O-methyladenine
  modified_base 44: mod_base = OTHER; note = 2'-O-methyladenine
  modified_base 49: mod_base = cm
  modified_base 50: mod_base = cm
  modified_base 52: mod_base = gm
  modified_base 54: mod_base = um
  modified_base 56: mod_base = cm
  modified_base 57: mod_base = OTHER; note = 2'-fluoro-guanine
  modified_base 59: mod_base = gm
  modified_base 61: mod_base = cm
  modified_base 65: mod_base = gm
  modified_base 73: mod_base = gm

SEQ ID NO: 956 - RNA, 76 nt, synthetic construct; identical to SEQ ID NO: 802
  misc_feature 1..76: note = Description of sequence: tRNA-based effector molecule
  source 1..76: mol_type = other RNA
  modified_base 1: mod_base = gm
  modified_base 2: mod_base = gm
  modified_base 3: mod_base = cm
  modified_base 4: mod_base = cm
  modified_base 5: mod_base = cm
  modified_base 6: mod_base = cm
  modified_base 14: mod_base = OTHER; note = 2'-O-methyladenine
  modified_base 15: mod_base = OTHER; note = 2'-O-methyladenine
  modified_base 16: mod_base = um
  modified_base 17: mod_base = gm
  modified_base 18: mod_base = gm
  modified_base 20: mod_base = um
  modified_base 25: mod_base = cm
  modified_base 41: mod_base = cm
  modified_base 42: mod_base = OTHER; note = 2'-O-methyladenine
  modified_base 43: mod_base = OTHER; note = 2'-O-methyladenine
  modified_base 44: mod_base = OTHER; note = 2'-O-methyladenine
  modified_base 49: mod_base = gm
  modified_base 50: mod_base = cm
  modified_base 52: mod_base = gm
  modified_base 54: mod_base = um
  modified_base 56: mod_base = cm
  modified_base 57: mod_base = OTHER; note = 2'-fluoro-guanine
  modified_base 59: mod_base = gm
  modified_base 61: mod_base = cm
  modified_base 65: mod_base = cm
  modified_base 73: mod_base = gm

SEQ ID NO: 957 - RNA, 76 nt, synthetic construct; identical to SEQ ID NO: 702
  misc_feature 1..76: note = Description of sequence: tRNA-based effector molecule
  source 1..76: mol_type = other RNA
  modified_base 1: mod_base = gm
  modified_base 2: mod_base = gm
  modified_base 3: mod_base = cm
  modified_base 4: mod_base = um
  modified_base 5: mod_base = cm
  modified_base 6: mod_base = cm
  modified_base 14: mod_base = OTHER; note = 2'-O-methyladenine
  modified_base 15: mod_base = OTHER; note = 2'-O-methyladenine
  modified_base 16: mod_base = um
  modified_base 17: mod_base = gm
  modified_base 18: mod_base = gm
  modified_base 20: mod_base = um
  modified_base 25: mod_base = cm
  modified_base 41: mod_base = gm
  modified_base 42: mod_base = gm
  modified_base 43: mod_base = um
  modified_base 44: mod_base = OTHER; note = 2'-O-methyladenine
  modified_base 49: mod_base = cm
  modified_base 50: mod_base = cm
  modified_base 52: mod_base = gm
  modified_base 54: mod_base = um
  modified_base 56: mod_base = cm
  modified_base 57: mod_base = OTHER; note = 2'-fluoro-guanine
  modified_base 59: mod_base = gm
  modified_base 61: mod_base = cm
  modified_base 65: mod_base = gm
  modified_base 73: mod_base = gm

SEQ ID NO: 958 - RNA, 76 nt, synthetic construct; identical to SEQ ID NO: 710
  misc_feature 1..76: note = Description of sequence: tRNA-based effector molecule
  source 1..76: mol_type = other RNA
  modified_base 1: mod_base = gm
  modified_base 2: mod_base = gm
  modified_base 3: mod_base = cm
  modified_base 4: mod_base = um
  modified_base 5: mod_base = cm
  modified_base 6: mod_base = cm
  modified_base 14: mod_base = OTHER; note = 2'-O-methyladenine
  modified_base 15: mod_base = OTHER; note = 2'-O-methyladenine
  modified_base 16: mod_base = um
  modified_base 17: mod_base = gm
  modified_base 18: mod_base = gm
  modified_base 20: mod_base = um
  modified_base 25: mod_base = cm
  modified_base 41: mod_base = cm
  modified_base 42: mod_base = gm
  modified_base 43: mod_base = OTHER; note = 2'-O-methyladenine
  modified_base 44: mod_base = OTHER; note = 2'-O-methyladenine
  modified_base 49: mod_base = cm
  modified_base 50: mod_base = cm
  modified_base 52: mod_base = gm
  modified_base 54: mod_base = um
  modified_base 56: mod_base = cm
  modified_base 57: mod_base = OTHER; note = 2'-fluoro-guanine
  modified_base 59: mod_base = gm
  modified_base 61: mod_base = cm
  modified_base 65: mod_base = gm
  modified_base 73: mod_base = gm

SEQ ID NO: 959 - RNA, 76 nt, synthetic construct; identical to SEQ ID NO: 805
  misc_feature 1..76: note = Description of sequence: tRNA-based effector molecule
  source 1..76: mol_type = other RNA
  modified_base 1: mod_base = gm
  modified_base 2: mod_base = gm
  modified_base 3: mod_base = cm
  modified_base 4: mod_base = um
  modified_base 5: mod_base = cm
  modified_base 6: mod_base = cm
  modified_base 14: mod_base = OTHER; note = 2'-O-methyladenine
  modified_base 15: mod_base = OTHER; note = 2'-O-methyladenine
  modified_base 16: mod_base = um
  modified_base 17: mod_base = gm
  modified_base 18: mod_base = gm
  modified_base 20: mod_base = um
  modified_base 25: mod_base = cm
  modified_base 41: mod_base = cm
  modified_base 42: mod_base = OTHER; note = 2'-O-methyladenine
  modified_base 43: mod_base = OTHER; note = 2'-O-methyladenine
  modified_base 44: mod_base = OTHER; note = 2'-O-methyladenine
  modified_base 49: mod_base = gm
  modified_base 50: mod_base = cm
  modified_base 52: mod_base = gm
  modified_base 54: mod_base = um
  modified_base 56: mod_base = cm
  modified_base 57: mod_base = OTHER; note = 2'-fluoro-guanine
  modified_base 59: mod_base = gm
  modified_base 61: mod_base = cm
  modified_base 65: mod_base = cm
  modified_base 73: mod_base = gm

SEQ ID NO: 960 - RNA, 76 nt, synthetic construct; identical to SEQ ID NO: 743
  misc_feature 1..76: note = Description of sequence: tRNA-based effector molecule
  source 1..76: mol_type = other RNA
  modified_base 1: mod_base = gm
  modified_base 2: mod_base = gm
  modified_base 3: mod_base = cm
  modified_base 4: mod_base = um
  modified_base 5: mod_base = cm
  modified_base 6: mod_base = cm
  modified_base 14: mod_base = OTHER; note = 2'-O-methyladenine
  modified_base 15: mod_base = OTHER; note = 2'-O-methyladenine
  modified_base 16: mod_base = um
  modified_base 17: mod_base = gm
  modified_base 18: mod_base = gm
  modified_base 20: mod_base = um
  modified_base 25: mod_base = cm
  modified_base 41: mod_base = cm
  modified_base 42: mod_base = OTHER; note = 2'-O-methyladenine
  modified_base 43: mod_base = OTHER; note = 2'-O-methyladenine
  modified_base 44: mod_base = gm
  modified_base 49: mod_base = cm
  modified_base 50: mod_base = cm
  modified_base 52: mod_base = gm
  modified_base 54: mod_base = um
  modified_base 56: mod_base = cm
  modified_base 57: mod_base = OTHER; note = 2'-fluoro-guanine
  modified_base 59: mod_base = gm
  modified_base 61: mod_base = cm
  modified_base 65: mod_base = gm
  modified_base 73: mod_base = gm

SEQ ID NO: 961 - RNA, 76 nt, synthetic construct; identical to SEQ ID NO: 794
  misc_feature 1..76: note = Description of sequence: tRNA-based effector molecule
  source 1..76: mol_type = other RNA
  modified_base 1: mod_base = um
  modified_base 2: mod_base = OTHER; note = 2'-O-methyladenine
  modified_base 3: mod_base = cm
  modified_base 4: mod_base = OTHER; note = 2'-O-methyladenine
  modified_base 5: mod_base = cm
  modified_base 6: mod_base = cm
  modified_base 14: mod_base = OTHER; note = 2'-O-methyladenine
  modified_base 15: mod_base = OTHER; note = 2'-O-methyladenine
  modified_base 16: mod_base = um
  modified_base 17: mod_base = gm
  modified_base 18: mod_base = gm
  modified_base 20: mod_base = um
  modified_base 25: mod_base = cm
  modified_base 41: mod_base = cm
  modified_base 42: mod_base = OTHER; note = 2'-O-methyladenine
  modified_base 43: mod_base = OTHER; note = 2'-O-methyladenine
  modified_base 44: mod_base = OTHER; note = 2'-O-methyladenine
  modified_base 49: mod_base = cm
  modified_base 50: mod_base = cm
  modified_base 52: mod_base = gm
  modified_base 54: mod_base = um
  modified_base 56: mod_base = cm
  modified_base 57: mod_base = OTHER; note = 2'-fluoro-guanine
  modified_base 59: mod_base = gm
  modified_base 61: mod_base = cm
  modified_base 65: mod_base = gm
  modified_base 73: mod_base = gm

SEQ ID NO: 962 - RNA, 76 nt, synthetic construct; identical to SEQ ID NO: 627
  misc_feature 1..76: note = Description of sequence: tRNA-based effector molecule
  source 1..76: mol_type = other RNA
  modified_base 1: mod_base = OTHER; note = 2'-O-methyladenine
  modified_base 2: mod_base = cm
  modified_base 3: mod_base = cm
  modified_base 4: mod_base = OTHER; note = 2'-O-methyladenine
  modified_base 5: mod_base = OTHER; note = 2'-O-methyladenine
  modified_base 6: mod_base = cm
  modified_base 14: mod_base = OTHER; note = 2'-O-methyladenine
  modified_base 15: mod_base = OTHER; note = 2'-O-methyladenine
  modified_base 16: mod_base = um
  modified_base 17: mod_base = gm
  modified_base 18: mod_base = gm
  modified_base 20: mod_base = um
  modified_base 25: mod_base = cm
  modified_base 41: mod_base = cm
  modified_base 42: mod_base = OTHER; note = 2'-O-methyladenine
  modified_base 43: mod_base = OTHER; note = 2'-O-methyladenine
  modified_base 44: mod_base = OTHER; note = 2'-O-methyladenine
  modified_base 49: mod_base = cm
  modified_base 50: mod_base = cm
  modified_base 52: mod_base = gm
  modified_base 54: mod_base = um
  modified_base 56: mod_base = cm
  modified_base 57: mod_base = OTHER; note = 2'-fluoro-guanine
  modified_base 59: mod_base = gm
  modified_base 61: mod_base = cm
  modified_base 62: mod_base = cm
  modified_base 63: mod_base = OTHER; note = 2'-fluoro-cytosine
  modified_base 64: mod_base = gm
  modified_base 65: mod_base = gm
  modified_base 73: mod_base = gm

SEQ ID NO: 963 - RNA, 76 nt, synthetic construct; identical to SEQ ID NO: 639
  misc_feature 1..76: note = Description of sequence: tRNA-based effector molecule
  source 1..76: mol_type = other RNA
  modified_base 1: mod_base = gm
  modified_base 2: mod_base = cm
  modified_base 3: mod_base = cm
  modified_base 4: mod_base = cm
  modified_base 5: mod_base = gm
  modified_base 6: mod_base = OTHER; note = 2'-O-methyladenine
  modified_base 14: mod_base = OTHER; note = 2'-O-methyladenine
  modified_base 15: mod_base = OTHER; note = 2'-O-methyladenine
  modified_base 16: mod_base = um
  modified_base 17: mod_base = gm
  modified_base 18: mod_base = gm
  modified_base 20: mod_base = um
  modified_base 25: mod_base = cm
  modified_base 41: mod_base = cm
  modified_base 42: mod_base = OTHER; note = 2'-O-methyladenine
  modified_base 43: mod_base = OTHER; note = 2'-O-methyladenine
  modified_base 44: mod_base = OTHER; note = 2'-O-methyladenine
  modified_base 49: mod_base = cm
  modified_base 50: mod_base = cm
  modified_base 52: mod_base = gm
  modified_base 54: mod_base = um
  modified_base 56: mod_base = cm
  modified_base 57: mod_base = OTHER; note = 2'-fluoro-guanine
  modified_base 59: mod_base = gm
  modified_base 61: mod_base = cm
  modified_base 62: mod_base = cm
  modified_base 63: mod_base = OTHER; note = 2'-fluoro-cytosine
  modified_base 64: mod_base = gm
  modified_base 65: mod_base = gm
  modified_base 73: mod_base = gm

SEQ ID NO: 964 - RNA, 76 nt, synthetic construct; identical to SEQ ID NO: 799
  misc_feature 1..76: note = Description of sequence: tRNA-based effector molecule
  source 1..76: mol_type = other RNA
  modified_base 1: mod_base = gm
  modified_base 2: mod_base = cm
  modified_base 3: mod_base = cm
  modified_base 4: mod_base = um
  modified_base 5: mod_base = cm
  modified_base 6: mod_base = cm
  modified_base 14: mod_base = OTHER; note = 2'-O-methyladenine
  modified_base 15: mod_base = OTHER; note = 2'-O-methyladenine
  modified_base 16: mod_base = um
  modified_base 17: mod_base = gm
  modified_base 18: mod_base = gm
  modified_base 20: mod_base = um
  modified_base 25: mod_base = cm
  modified_base 41: mod_base = cm
  modified_base 42: mod_base = gm
  modified_base 43: mod_base = gm
  modified_base 44: mod_base = gm
  modified_base 49: mod_base = gm
  modified_base 50: mod_base = cm
  modified_base 52: mod_base = gm
  modified_base 54: mod_base = um
  modified_base 56: mod_base = cm
  modified_base 57: mod_base = OTHER; note = 2'-fluoro-guanine
  modified_base 59: mod_base = gm
  modified_base 61: mod_base = cm
  modified_base 62: mod_base = cm
  modified_base 63: mod_base = OTHER; note = 2'-fluoro-cytosine
  modified_base 64: mod_base = gm
  modified_base 65: mod_base = um
  modified_base 73: mod_base = gm

SEQ ID NO: 965 - RNA, 76 nt, synthetic construct; identical to SEQ ID NO: 641
  misc_feature 1..76: note = Description of sequence: tRNA-based effector molecule
  source 1..76: mol_type = other RNA
  modified_base 1: mod_base = gm
  modified_base 2: mod_base = cm
  modified_base 3: mod_base = cm
  modified_base 4: mod_base = um
  modified_base 5: mod_base = cm
  modified_base 6: mod_base = cm
  modified_base 14: mod_base = OTHER; note = 2'-O-methyladenine
  modified_base 15: mod_base = OTHER; note = 2'-O-methyladenine
  modified_base 16: mod_base = um
  modified_base 17: mod_base = gm
  modified_base 18: mod_base = gm
  modified_base 20: mod_base = um
  modified_base 25: mod_base = cm
  modified_base 41: mod_base = cm
  modified_base 42: mod_base = OTHER; note = 2'-O-methyladenine
  modified_base 43: mod_base = cm
  modified_base 44: mod_base = OTHER; note = 2'-O-methyladenine
  modified_base 49: mod_base = cm
  modified_base 50: mod_base = cm
  modified_base 52: mod_base = gm
  modified_base 54: mod_base = um
  modified_base 56: mod_base = cm
  modified_base 57: mod_base = OTHER; note = 2'-fluoro-guanine
  modified_base 59: mod_base = gm
  modified_base 61: mod_base = cm
  modified_base 62: mod_base = cm
  modified_base 63: mod_base = OTHER; note = 2'-fluoro-cytosine
  modified_base 64: mod_base = gm
  modified_base 65: mod_base = gm
  modified_base 73: mod_base = gm

SEQ ID NO: 966 - RNA, 76 nt, synthetic construct; identical to SEQ ID NO: 652
  misc_feature 1..76: note = Description of sequence: tRNA-based effector molecule
  source 1..76: mol_type = other RNA
  modified_base 1: mod_base = gm
  modified_base 2: mod_base = gm
  modified_base 3: mod_base = cm
  modified_base 4: mod_base = cm
  modified_base 5: mod_base = cm
  modified_base 6: mod_base = cm
  modified_base 14: mod_base = OTHER; note = 2'-O-methyladenine
  modified_base 15: mod_base = OTHER; note = 2'-O-methyladenine
  modified_base 16: mod_base = um
  modified_base 17: mod_base = gm
  modified_base 18: mod_base = gm
  modified_base 20: mod_base = um
  modified_base 25: mod_base = cm
  modified_base 41: mod_base = cm
  modified_base 42: mod_base = OTHER; note = 2'-O-methyladenine
  modified_base 43: mod_base = OTHER; note = 2'-O-methyladenine
  modified_base 44: mod_base = OTHER; note = 2'-O-methyladenine
  modified_base 49: mod_base = cm
  modified_base 50: mod_base = cm
  modified_base 52: mod_base = gm
  modified_base 54: mod_base = um
  modified_base 56: mod_base = cm
  modified_base 57: mod_base = OTHER; note = 2'-fluoro-guanine
  modified_base 59: mod_base = gm
  modified_base 61: mod_base = cm
  modified_base 62: mod_base = cm
  modified_base 63: mod_base = OTHER; note = 2'-fluoro-cytosine
  modified_base 64: mod_base = gm
  modified_base 65: mod_base = gm
  modified_base 73: mod_base = gm

SEQ ID NO: 967 - RNA, 76 nt, synthetic construct; identical to SEQ ID NO: 802
  misc_feature 1..76: note = Description of sequence: tRNA-based effector molecule
  source 1..76: mol_type = other RNA
  modified_base 1: mod_base = gm
  modified_base 2: mod_base = gm
  modified_base 3: mod_base = cm
  modified_base 4: mod_base = cm
  modified_base 5: mod_base = cm
  modified_base 6: mod_base = cm
  modified_base 14: mod_base = OTHER; note = 2'-O-methyladenine
  modified_base 15: mod_base = OTHER; note = 2'-O-methyladenine
  modified_base 16: mod_base = um
  modified_base 17: mod_base = gm
  modified_base 18: mod_base = gm
  modified_base 20: mod_base = um
  modified_base 25: mod_base = cm
  modified_base 41: mod_base = cm
  modified_base 42: mod_base = OTHER; note = 2'-O-methyladenine
  modified_base 43: mod_base = OTHER; note = 2'-O-methyladenine
  modified_base 44: mod_base = OTHER; note = 2'-O-methyladenine
  modified_base 49: mod_base = gm
  modified_base 50: mod_base = cm
  modified_base 52: mod_base = gm
  modified_base 54: mod_base = um
  modified_base 56: mod_base = cm
  modified_base 57: mod_base = OTHER; note = 2'-fluoro-guanine
  modified_base 59: mod_base = gm
  modified_base 61: mod_base = cm
  modified_base 62: mod_base = cm
  modified_base 63: mod_base = OTHER; note = 2'-fluoro-cytosine
  modified_base 64: mod_base = gm
  modified_base 65: mod_base = cm
  modified_base 73: mod_base = gm

SEQ ID NO: 968 - RNA, 76 nt, synthetic construct; identical to SEQ ID NO: 702
  misc_feature 1..76: note = Description of sequence: tRNA-based effector molecule
  source 1..76: mol_type = other RNA
  modified_base 1: mod_base = gm
  modified_base 2: mod_base = gm
  modified_base 3: mod_base = cm
  modified_base 4: mod_base = um
  modified_base 5: mod_base = cm
  modified_base 6: mod_base = cm
  modified_base 14: mod_base = OTHER; note = 2'-O-methyladenine
  modified_base 15: mod_base = OTHER; note = 2'-O-methyladenine
  modified_base 16: mod_base = um
  modified_base 17: mod_base = gm
  modified_base 18: mod_base = gm
  modified_base 20: mod_base = um
  modified_base 25: mod_base = cm
  modified_base 41: mod_base = gm
  modified_base 42: mod_base = gm
  modified_base 43: mod_base = um
  modified_base 44: mod_base = OTHER; note = 2'-O-methyladenine
  modified_base 49: mod_base = cm
  modified_base 50: mod_base = cm
  modified_base 52: mod_base = gm
  modified_base 54: mod_base = um
  modified_base 56: mod_base = cm
  modified_base 57: mod_base = OTHER; note = 2'-fluoro-guanine
  modified_base 59: mod_base = gm
  modified_base 61: mod_base = cm
  modified_base 62: mod_base = cm
  modified_base 63: mod_base = OTHER; note = 2'-fluoro-cytosine
  modified_base 64: mod_base = gm
  modified_base 65: mod_base = gm
  modified_base 73: mod_base = gm

SEQ ID NO: 969 - RNA, 76 nt, synthetic construct; identical to SEQ ID NO: 710
  misc_feature 1..76: note = Description of sequence: tRNA-based effector molecule
  source 1..76: mol_type = other RNA
  modified_base 1: mod_base = gm
  modified_base 2: mod_base = gm
  modified_base 3: mod_base = cm
  modified_base 4: mod_base = um
  modified_base 5: mod_base = cm
  modified_base 6: mod_base = cm
  modified_base 14: mod_base = OTHER; note = 2'-O-methyladenine
  modified_base 15: mod_base = OTHER; note = 2'-O-methyladenine
  modified_base 16: mod_base = um
  modified_base 17: mod_base = gm
  modified_base 18: mod_base = gm
  modified_base 20: mod_base = um
  modified_base 25: mod_base = cm
  modified_base 41: mod_base = cm
  modified_base 42: mod_base = gm
  modified_base 43: mod_base = OTHER; note = 2'-O-methyladenine
  modified_base 44: mod_base = OTHER; note = 2'-O-methyladenine
  modified_base 49: mod_base = cm
  modified_base 50: mod_base = cm
  modified_base 52: mod_base = gm
  modified_base 54: mod_base = um
  modified_base 56: mod_base = cm
  modified_base 57: mod_base = OTHER; note = 2'-fluoro-guanine
  modified_base 59: mod_base = gm
  modified_base 61: mod_base = cm
  modified_base 62: mod_base = cm
  modified_base 63: mod_base = OTHER; note = 2'-fluoro-cytosine
  modified_base 64: mod_base = gm
  modified_base 65: mod_base = gm
  modified_base 73: mod_base = gm

SEQ ID NO: 970 - RNA, 76 nt, synthetic construct; identical to SEQ ID NO: 805
  misc_feature 1..76: note = Description of sequence: tRNA-based effector molecule
  source 1..76: mol_type = other RNA
  modified_base 1: mod_base = gm
  modified_base 2: mod_base = gm
  modified_base 3: mod_base = cm
  modified_base 4: mod_base = um
  modified_base 5: mod_base = cm
  modified_base 6: mod_base = cm
  modified_base 14: mod_base = OTHER; note = 2'-O-methyladenine
  modified_base 15: mod_base = OTHER; note = 2'-O-methyladenine
  modified_base 16: mod_base = um
  modified_base 17: mod_base = gm
  modified_base 18: mod_base = gm
  modified_base 20: mod_base = um
  modified_base 25: mod_base = cm
  modified_base 41: mod_base = cm
  modified_base 42: mod_base = OTHER; note = 2'-O-methyladenine
  modified_base 43: mod_base = OTHER; note = 2'-O-methyladenine
  modified_base 44: mod_base = OTHER; note = 2'-O-methyladenine
  modified_base 49: mod_base = gm
  modified_base 50: mod_base = cm
  modified_base 52: mod_base = gm
  modified_base 54: mod_base = um
  modified_base 56: mod_base = cm
  modified_base 57: mod_base = OTHER; note = 2'-fluoro-guanine
  modified_base 59: mod_base = gm
  modified_base 61: mod_base = cm
  modified_base 62: mod_base = cm
  modified_base 63: mod_base = OTHER; note = 2'-fluoro-cytosine
  modified_base 64: mod_base = gm
  modified_base 65: mod_base = cm
  modified_base 73: mod_base = gm

SEQ ID NO: 971 - RNA, 76 nt, synthetic construct; identical to SEQ ID NO: 743
  misc_feature 1..76: note = Description of sequence: tRNA-based effector molecule
  source 1..76: mol_type = other RNA
  modified_base 1: mod_base = gm
  modified_base 2: mod_base = gm
  modified_base 3: mod_base = cm
  modified_base 4: mod_base = um
  modified_base 5: mod_base = cm
  modified_base 6: mod_base = cm
  modified_base 14: mod_base = OTHER; note = 2'-O-methyladenine
  modified_base 15: mod_base = OTHER; note = 2'-O-methyladenine
  modified_base 16: mod_base = um
  modified_base 17: mod_base = gm
  modified_base 18: mod_base = gm
  modified_base 20: mod_base = um
  modified_base 25: mod_base = cm
  modified_base 41: mod_base = cm
  modified_base 42: mod_base = OTHER; note = 2'-O-methyladenine
  modified_base 43: mod_base = OTHER; note = 2'-O-methyladenine
  modified_base 44: mod_base = gm
  modified_base 49: mod_base = cm
  modified_base 50: mod_base = cm
  modified_base 52: mod_base = gm
  modified_base 54: mod_base = um
  modified_base 56: mod_base = cm
  modified_base 57: mod_base = OTHER; note = 2'-fluoro-guanine
  modified_base 59: mod_base = gm
  modified_base 61: mod_base = cm
  modified_base 62: mod_base = cm
  modified_base 63: mod_base = OTHER; note = 2'-fluoro-cytosine
  modified_base 64: mod_base = gm
  modified_base 65: mod_base = gm
  modified_base 73: mod_base = gm

SEQ ID NO: 972 - RNA, 76 nt, synthetic construct; identical to SEQ ID NO: 794
  misc_feature 1..76: note = Description of sequence: tRNA-based effector molecule
  source 1..76: mol_type = other RNA
  modified_base 1: mod_base = um
  modified_base 2: mod_base = OTHER; note = 2'-O-methyladenine
  modified_base 3: mod_base = cm
  modified_base 4: mod_base = OTHER; note = 2'-O-methyladenine
  modified_base 5: mod_base = cm
  modified_base 6: mod_base = cm
  modified_base 14: mod_base = OTHER; note = 2'-O-methyladenine
  modified_base 15: mod_base = OTHER; note = 2'-O-methyladenine
  modified_base 16: mod_base = um
  modified_base 17: mod_base = gm
  modified_base 18: mod_base = gm
  modified_base 20: mod_base = um
  modified_base 25: mod_base = cm
  modified_base 41: mod_base = cm
  modified_base 42: mod_base = OTHER; note = 2'-O-methyladenine
  modified_base 43: mod_base = OTHER; note = 2'-O-methyladenine
  modified_base 44: mod_base = OTHER; note = 2'-O-methyladenine
  modified_base 49: mod_base = cm
  modified_base 50: mod_base = cm
  modified_base 52: mod_base = gm
  modified_base 54: mod_base = um
  modified_base 56: mod_base = cm
  modified_base 57: mod_base = OTHER; note = 2'-fluoro-guanine
  modified_base 59: mod_base = gm
  modified_base 61: mod_base = cm
  modified_base 62: mod_base = cm
  modified_base 63: mod_base = OTHER; note = 2'-fluoro-cytosine
  modified_base 64: mod_base = gm
  modified_base 65: mod_base = gm
  modified_base 73: mod_base = gm

SEQ ID NO: 973 - RNA, 76 nt, synthetic construct; identical to SEQ ID NO: 627
  misc_feature 1..76: note = Description of sequence: tRNA-based effector molecule
  source 1..76: mol_type = other RNA
  modified_base 1: mod_base = OTHER; note = 2'-O-methyladenine
  modified_base 2: mod_base = cm
  modified_base 3: mod_base = cm
  modified_base 4: mod_base = OTHER; note = 2'-O-methyladenine
  modified_base 5: mod_base = OTHER; note = 2'-O-methyladenine
  modified_base 6: mod_base = cm
  modified_base 14: mod_base = OTHER; note = 2'-O-methyladenine
  modified_base 15: mod_base = OTHER; note = 2'-O-methyladenine
  modified_base 16: mod_base = um
  modified_base 17: mod_base = gm
  modified_base 18: mod_base = gm
  modified_base 20: mod_base = um
  modified_base 25: mod_base = cm
  modified_base 33: mod_base = OTHER; note = 2'-fluoro-uracil
  modified_base 41: mod_base = cm
  modified_base 42: mod_base = OTHER; note = 2'-O-methyladenine
  modified_base 43: mod_base = OTHER; note = 2'-O-methyladenine
  modified_base 44: mod_base = OTHER; note = 2'-fluoro-adenine
  modified_base 49: mod_base = cm
  modified_base 50: mod_base = cm
  modified_base 52: mod_base = gm
  modified_base 54: mod_base = um
  modified_base 56: mod_base = cm
  modified_base 57: mod_base = OTHER; note = 2'-fluoro-guanine
  modified_base 59: mod_base = gm
  modified_base 61: mod_base = cm
  modified_base 65: mod_base = gm
  modified_base 73: mod_base = gm

SEQ ID NO: 974 - RNA, 76 nt, synthetic construct; identical to SEQ ID NO: 639
  misc_feature 1..76: note = Description of sequence: tRNA-based effector molecule
  source 1..76: mol_type = other RNA
  modified_base 1: mod_base = gm
  modified_base 2: mod_base = cm
  modified_base 3: mod_base = cm
  modified_base 4: mod_base = cm
  modified_base 5: mod_base = gm
  modified_base 6: mod_base = OTHER; note = 2'-O-methyladenine
  modified_base 14: mod_base = OTHER; note = 2'-O-methyladenine
  modified_base 15: mod_base = OTHER; note = 2'-O-methyladenine
  modified_base 16: mod_base = um
  modified_base 17: mod_base = gm
  modified_base 18: mod_base = gm
  modified_base 20: mod_base = um
  modified_base 25: mod_base = cm
  modified_base 33: mod_base = OTHER; note = 2'-fluoro-uracil
  modified_base 41: mod_base = cm
  modified_base 42: mod_base = OTHER; note = 2'-O-methyladenine
  modified_base 43: mod_base = OTHER; note = 2'-O-methyladenine
  modified_base 44: mod_base = OTHER; note = 2'-fluoro-adenine
  modified_base 49: mod_base = cm
  modified_base 50: mod_base = cm
  modified_base 52: mod_base = gm
  modified_base 54: mod_base = um
  modified_base 56: mod_base = cm
  modified_base 57: mod_base = OTHER; note = 2'-fluoro-guanine
  modified_base 59: mod_base = gm
  modified_base 61: mod_base = cm
  modified_base 65: mod_base = gm
  modified_base 73: mod_base = gm

SEQ ID NO: 975 - RNA, 76 nt, synthetic construct; identical to SEQ ID NO: 799
  misc_feature 1..76: note = Description of sequence: tRNA-based effector molecule
  source 1..76: mol_type = other RNA
  modified_base 1: mod_base = gm
  modified_base 2: mod_base = cm
  modified_base 3: mod_base = cm
  modified_base 4: mod_base = um
  modified_base 5: mod_base = cm
  modified_base 6: mod_base = cm
  modified_base 14: mod_base = OTHER; note = 2'-O-methyladenine
  modified_base 15: mod_base = OTHER; note = 2'-O-methyladenine
  modified_base 16: mod_base = um
  modified_base 17: mod_base = gm
  modified_base 18: mod_base = gm
  modified_base 20: mod_base = um
  modified_base 25: mod_base = cm
  modified_base 33: mod_base = OTHER; note = 2'-fluoro-uracil
  modified_base 41: mod_base = cm
  modified_base 42: mod_base = gm
  modified_base 43: mod_base = gm
  modified_base 44: mod_base = OTHER; note = 2'-fluoro-guanine
  modified_base 49: mod_base = gm
  modified_base 50: mod_base = cm
  modified_base 52: mod_base = gm
  modified_base 54: mod_base = um
  modified_base 56: mod_base = cm
  modified_base 57: mod_base = OTHER; note = 2'-fluoro-guanine
  modified_base 59: mod_base = gm
  modified_base 61: mod_base = cm
  modified_base 65: mod_base = um
  modified_base 73: mod_base = gm

SEQ ID NO: 976 - RNA, 76 nt, synthetic construct; identical to SEQ ID NO: 641
  misc_feature 1..76: note = Description of sequence: tRNA-based effector molecule
  source 1..76: mol_type = other RNA
  modified_base 1: mod_base = gm
  modified_base 2: mod_base = cm
  modified_base 3: mod_base = cm
  modified_base 4: mod_base = um
  modified_base 5: mod_base = cm
  modified_base 6: mod_base = cm
  modified_base 14: mod_base = OTHER; note = 2'-O-methyladenine
  modified_base 15: mod_base = OTHER; note = 2'-O-methyladenine
  modified_base 16: mod_base = um
  modified_base 17: mod_base = gm
  modified_base 18: mod_base = gm
  modified_base 20: mod_base = um
  modified_base 25: mod_base = cm
  modified_base 33: mod_base = OTHER; note = 2'-fluoro-uracil
  modified_base 41: mod_base = cm
  modified_base 42: mod_base = OTHER; note = 2'-O-methyladenine
  modified_base 43: mod_base = cm
  modified_base 44: mod_base = OTHER; note = 2'-fluoro-adenine
  modified_base 49: mod_base = cm
  modified_base 50: mod_base = cm
  modified_base 52: mod_base = gm
  modified_base 54: mod_base = um
  modified_base 56: mod_base = cm
  modified_base 57: mod_base = OTHER; note = 2'-fluoro-guanine
  modified_base 59: mod_base = gm
  modified_base 61: mod_base = cm
  modified_base 65: mod_base = gm
  modified_base 73: mod_base = gm

SEQ ID NO: 977 - RNA, 76 nt, synthetic construct; identical to SEQ ID NO: 652
  misc_feature 1..76: note = Description of sequence: tRNA-based effector molecule
  source 1..76: mol_type = other RNA
  modified_base 1: mod_base = gm
  modified_base 2: mod_base = gm
  modified_base 3: mod_base = cm
  modified_base 4: mod_base = cm
  modified_base 5: mod_base = cm
  modified_base 6: mod_base = cm
  modified_base 14: mod_base = OTHER; note = 2'-O-methyladenine
  modified_base 15: mod_base = OTHER; note = 2'-O-methyladenine
  modified_base 16: mod_base = um
  modified_base 17: mod_base = gm
  modified_base 18: mod_base = gm
  modified_base 20: mod_base = um
  modified_base 25: mod_base = cm
  modified_base 33: mod_base = OTHER; note = 2'-fluoro-uracil
  modified_base 41: mod_base = cm
  modified_base 42: mod_base = OTHER; note = 2'-O-methyladenine
  modified_base 43: mod_base = OTHER; note = 2'-O-methyladenine
  modified_base 44: mod_base = OTHER; note = 2'-fluoro-adenine
  modified_base 49: mod_base = cm
  modified_base 50: mod_base = cm
  modified_base 52: mod_base = gm
  modified_base 54: mod_base = um
  modified_base 56: mod_base = cm
  modified_base 57: mod_base = OTHER; note = 2'-fluoro-guanine
  modified_base 59: mod_base = gm
  modified_base 61: mod_base = cm
  modified_base 65: mod_base = gm
  modified_base 73: mod_base = gm

SEQ ID NO: 978 - RNA, 76 nt, synthetic construct; identical to SEQ ID NO: 802
  misc_feature 1..76: note = Description of sequence: tRNA-based effector molecule
  source 1..76: mol_type = other RNA
  modified_base 1: mod_base = gm
  modified_base 2: mod_base = gm
  modified_base 3: mod_base = cm
  modified_base 4: mod_base = cm
  modified_base 5: mod_base = cm
  modified_base 6: mod_base = cm
  modified_base 14: mod_base = OTHER; note = 2'-O-methyladenine
  modified_base 15: mod_base = OTHER; note = 2'-O-methyladenine
  modified_base 16: mod_base = um
  modified_base 17: mod_base = gm
  modified_base 18: mod_base = gm
  modified_base 20: mod_base = um
  modified_base 25: mod_base = cm
  modified_base 33: mod_base = OTHER; note = 2'-fluoro-uracil
  modified_base 41: mod_base = cm
  modified_base 42: mod_base = OTHER; note = 2'-O-methyladenine
  modified_base 43: mod_base = OTHER; note = 2'-O-methyladenine
  modified_base 44: mod_base = OTHER; note = 2'-fluoro-adenine
  modified_base 49: mod_base = gm
  modified_base 50: mod_base = cm
  modified_base 52: mod_base = gm
  modified_base 54: mod_base = um
  modified_base 56: mod_base = cm
  modified_base 57: mod_base = OTHER; note = 2'-fluoro-guanine
  modified_base 59: mod_base = gm
  modified_base 61: mod_base = cm
  modified_base 65: mod_base = cm
  modified_base 73: mod_base = gm

SEQ ID NO: 979 - RNA, 76 nt, synthetic construct; identical to SEQ ID NO: 702
  misc_feature 1..76: note = Description of sequence: tRNA-based effector molecule
  source 1..76: mol_type = other RNA
  modified_base 1: mod_base = gm
  modified_base 2: mod_base = gm
  modified_base 3: mod_base = cm
  modified_base 4: mod_base = um
  modified_base 5: mod_base = cm
  modified_base 6: mod_base = cm
  modified_base 14: mod_base = OTHER; note = 2'-O-methyladenine
  modified_base 15: mod_base = OTHER; note = 2'-O-methyladenine
  modified_base 16: mod_base = um
  modified_base 17: mod_base = gm
  modified_base 18: mod_base = gm
  modified_base 20: mod_base = um
  modified_base 25: mod_base = cm
  modified_base 33: mod_base = OTHER; note = 2'-fluoro-uracil
  modified_base 41: mod_base = gm
  modified_base 42: mod_base = gm
  modified_base 43: mod_base = um
  modified_base 44: mod_base = OTHER; note = 2'-fluoro-adenine
  modified_base 49: mod_base = cm
  modified_base 50: mod_base = cm
  modified_base 52: mod_base = gm
  modified_base 54: mod_base = um
  modified_base 56: mod_base = cm
  modified_base 57: mod_base = OTHER; note = 2'-fluoro-guanine
  modified_base 59: mod_base = gm
  modified_base 61: mod_base = cm
  modified_base 65: mod_base = gm
  modified_base 73: mod_base = gm

SEQ ID NO: 980 - RNA, 76 nt, synthetic construct; identical to SEQ ID NO: 710
  misc_feature 1..76: note = Description of sequence: tRNA-based effector molecule
  source 1..76: mol_type = other RNA
  modified_base 1: mod_base = gm
  modified_base 2: mod_base = gm
  modified_base 3: mod_base = cm
  modified_base 4: mod_base = um
  modified_base 5: mod_base = cm
  modified_base 6: mod_base = cm
  modified_base 14: mod_base = OTHER; note = 2'-O-methyladenine
  modified_base 15: mod_base = OTHER; note = 2'-O-methyladenine
  modified_base 16: mod_base = um
  modified_base 17: mod_base = gm
  modified_base 18: mod_base = gm
  modified_base 20: mod_base = um
  modified_base 25: mod_base = cm
  modified_base 33: mod_base = OTHER; note = 2'-fluoro-uracil
  modified_base 41: mod_base = cm
  modified_base 42: mod_base = gm
  modified_base 43: mod_base = OTHER; note = 2'-O-methyladenine
  modified_base 44: mod_base = OTHER; note = 2'-fluoro-adenine
  modified_base 49: mod_base = cm
  modified_base 50: mod_base = cm
  modified_base 52: mod_base = gm
  modified_base 54: mod_base = um
  modified_base 56: mod_base = cm
  modified_base 57: mod_base = OTHER; note = 2'-fluoro-guanine
  modified_base 59: mod_base = gm
  modified_base 61: mod_base = cm
  modified_base 65: mod_base = gm
  modified_base 73: mod_base = gm

SEQ ID NO: 981 - RNA, 76 nt, synthetic construct; identical to SEQ ID NO: 805
  misc_feature 1..76: note = Description of sequence: tRNA-based effector molecule
  source 1..76: mol_type = other RNA
  modified_base 1: mod_base = gm
  modified_base 2: mod_base = gm
  modified_base 3: mod_base = cm
  modified_base 4: mod_base = um
  modified_base 5: mod_base = cm
  modified_base 6: mod_base = cm
  modified_base 14: mod_base = OTHER; note = 2'-O-methyladenine
  modified_base 15: mod_base = OTHER; note = 2'-O-methyladenine
  modified_base 16: mod_base = um
  modified_base 17: mod_base = gm
  modified_base 18: mod_base = gm
  modified_base 20: mod_base = um
  modified_base 25: mod_base = cm
  modified_base 33: mod_base = OTHER; note = 2'-fluoro-uracil
  modified_base 41: mod_base = cm
  modified_base 42: mod_base = OTHER; note = 2'-O-methyladenine
  modified_base 43: mod_base = OTHER; note = 2'-O-methyladenine
  modified_base 44: mod_base = OTHER; note = 2'-fluoro-adenine
  modified_base 49: mod_base = gm
  modified_base 50: mod_base = cm
  modified_base 52: mod_base = gm
  modified_base 54: mod_base = um
  modified_base 56: mod_base = cm
  modified_base 57: mod_base = OTHER; note = 2'-fluoro-guanine
  modified_base 59: mod_base = gm
  modified_base 61: mod_base = cm
  modified_base 65: mod_base = cm
  modified_base 73: mod_base = gm

SEQ ID NO: 982 - RNA, 76 nt, synthetic construct; identical to SEQ ID NO: 743
  misc_feature 1..76: note = Description of sequence: tRNA-based effector molecule
  source 1..76: mol_type = other RNA
  modified_base 1: mod_base = gm
  modified_base 2: mod_base = gm
  modified_base 3: mod_base = cm
  modified_base 4: mod_base = um
  modified_base 5: mod_base = cm
  modified_base 6: mod_base = cm
  modified_base 14: mod_base = OTHER; note = 2'-O-methyladenine
  modified_base 15: mod_base = OTHER; note = 2'-O-methyladenine
  modified_base 16: mod_base = um
  modified_base 17: mod_base = gm
  modified_base 18: mod_base = gm
  modified_base 20: mod_base = um
  modified_base 25: mod_base = cm
  modified_base 33: mod_base = OTHER; note = 2'-fluoro-uracil
  modified_base 41: mod_base = cm
  modified_base 42: mod_base = OTHER; note = 2'-O-methyladenine
  modified_base 43: mod_base = OTHER; note = 2'-O-methyladenine
  modified_base 44: mod_base = OTHER; note = 2'-fluoro-guanine
  modified_base 49: mod_base = cm
  modified_base 50: mod_base = cm
  modified_base 52: mod_base = gm
  modified_base 54: mod_base = um
  modified_base 56: mod_base = cm
  modified_base 57: mod_base = OTHER; note = 2'-fluoro-guanine
  modified_base 59: mod_base = gm
  modified_base 61: mod_base = cm
  modified_base 65: mod_base = gm
  modified_base 73: mod_base = gm

SEQ ID NO: 983 - RNA, 76 nt, synthetic construct; identical to SEQ ID NO: 794
  misc_feature 1..76: note = Description of sequence: tRNA-based effector molecule
  source 1..76: mol_type = other RNA
  modified_base 1: mod_base = um
  modified_base 2: mod_base = OTHER; note = 2'-O-methyladenine
  modified_base 3: mod_base = cm
  modified_base 4: mod_base = OTHER; note = 2'-O-methyladenine
  modified_base 5: mod_base = cm
  modified_base 6: mod_base = cm
  modified_base 14: mod_base = OTHER; note = 2'-O-methyladenine
  modified_base 15: mod_base = OTHER; note = 2'-O-methyladenine
  modified_base 16: mod_base = um
  modified_base 17: mod_base = gm
  modified_base 18: mod_base = gm
  modified_base 20: mod_base = um
  modified_base 25: mod_base = cm
  modified_base 33: mod_base = OTHER; note = 2'-fluoro-uracil
  modified_base 41: mod_base = cm
  modified_base 42: mod_base = OTHER; note = 2'-O-methyladenine
  modified_base 43: mod_base = OTHER; note = 2'-O-methyladenine
  modified_base 44: mod_base = OTHER; note = 2'-fluoro-adenine
  modified_base 49: mod_base = cm
  modified_base 50: mod_base = cm
  modified_base 52: mod_base = gm
  modified_base 54: mod_base = um
  modified_base 56: mod_base = cm
  modified_base 57: mod_base = OTHER; note = 2'-fluoro-guanine
  modified_base 59: mod_base = gm
  modified_base 61: mod_base = cm
  modified_base 65: mod_base = gm
  modified_base 73: mod_base = gm

SEQ ID NO: 984 - RNA, 76 nt, synthetic construct; identical to SEQ ID NO: 627
  misc_feature 1..76: note = Description of sequence: tRNA-based effector molecule
  source 1..76: mol_type = other RNA
  modified_base 1: mod_base = OTHER; note = 2'-O-methyladenine
  modified_base 2: mod_base = cm
  modified_base 3: mod_base = cm
  modified_base 4: mod_base = OTHER; note = 2'-O-methyladenine
  modified_base 5: mod_base = OTHER; note = 2'-O-methyladenine
  modified_base 6: mod_base = cm
  modified_base 14: mod_base = OTHER; note = 2'-O-methyladenine
  modified_base 15: mod_base = OTHER; note = 2'-O-methyladenine
  modified_base 16: mod_base = um
  modified_base 17: mod_base = gm
  modified_base 18: mod_base = gm
  modified_base 20: mod_base = um
  modified_base 25: mod_base = cm
  modified_base 33: mod_base = OTHER; note = 2'-fluoro-uracil
  modified_base 41: mod_base = OTHER; note = 2'-fluoro-cytosine
  modified_base 42: mod_base = OTHER; note = 2'-O-methyladenine
  modified_base 43: mod_base = OTHER; note = 2'-O-methyladenine
  modified_base 44: mod_base = OTHER; note = 2'-fluoro-adenine
  modified_base 49: mod_base = cm
  modified_base 50: mod_base = cm
  modified_base 52: mod_base = gm
  modified_base 54: mod_base = um
  modified_base 56: mod_base = cm
  modified_base 57: mod_base = OTHER; note = 2'-fluoro-guanine
  modified_base 59: mod_base = gm
  modified_base 61: mod_base = cm
  modified_base 62: mod_base = cm
  modified_base 63: mod_base = OTHER; note = 2'-fluoro-cytosine
  modified_base 64: mod_base = gm
  modified_base 65: mod_base = gm
  modified_base 73: mod_base = gm

SEQ ID NO: 985 - RNA, 76 nt, synthetic construct; identical to SEQ ID NO: 639
  misc_feature 1..76: note = Description of sequence: tRNA-based effector molecule
  source 1..76: mol_type = other RNA
  modified_base 1: mod_base = gm
  modified_base 2: mod_base = cm
  modified_base 3: mod_base = cm
  modified_base 4: mod_base = cm
  modified_base 5: mod_base = gm
  modified_base 6: mod_base = OTHER; note = 2'-O-methyladenine
  modified_base 14: mod_base = OTHER; note = 2'-O-methyladenine
  modified_base 15: mod_base = OTHER; note = 2'-O-methyladenine
  modified_base 16: mod_base = um
  modified_base 17: mod_base = gm
  modified_base 18: mod_base = gm
  modified_base 20: mod_base = um
  modified_base 25: mod_base = cm
  modified_base 33: mod_base = OTHER; note = 2'-fluoro-uracil
  modified_base 41: mod_base = OTHER; note = 2'-fluoro-cytosine
  modified_base 42: mod_base = OTHER; note = 2'-O-methyladenine
  modified_base 43: mod_base = OTHER; note = 2'-O-methyladenine
  modified_base 44: mod_base = OTHER; note = 2'-fluoro-adenine
  modified_base 49: mod_base = cm
  modified_base 50: mod_base = cm
  modified_base 52: mod_base = gm
  modified_base 54: mod_base = um
  modified_base 56: mod_base = cm
  modified_base 57: mod_base = OTHER; note = 2'-fluoro-guanine
  modified_base 59: mod_base = gm
  modified_base 61: mod_base = cm
  modified_base 62: mod_base = cm
  modified_base 63: mod_base = OTHER; note = 2'-fluoro-cytosine
  modified_base 64: mod_base = gm
  modified_base 65: mod_base = gm
  modified_base 73: mod_base = gm

SEQ ID NO: 986 - RNA, 76 nt, synthetic construct; identical to SEQ ID NO: 799
  misc_feature 1..76: note = Description of sequence: tRNA-based effector molecule
  source 1..76: mol_type = other RNA
  modified_base 1: mod_base = gm
  modified_base 2: mod_base = cm
  modified_base 3: mod_base = cm
  modified_base 4: mod_base = um
  modified_base 5: mod_base = cm
  modified_base 6: mod_base = cm
  modified_base 14: mod_base = OTHER; note = 2'-O-methyladenine
  modified_base 15: mod_base = OTHER; note = 2'-O-methyladenine
  modified_base 16: mod_base = um
  modified_base 17: mod_base = gm
  modified_base 18: mod_base = gm
  modified_base 20: mod_base = um
  modified_base 25: mod_base = cm
  modified_base 33: mod_base = OTHER; note = 2'-fluoro-uracil
  modified_base 41: mod_base = OTHER; note = 2'-fluoro-cytosine
  modified_base 42: mod_base = gm
  modified_base 43: mod_base = gm
  modified_base 44: mod_base = OTHER; note = 2'-fluoro-guanine
  modified_base 49: mod_base = gm
  modified_base 50: mod_base = cm
  modified_base 52: mod_base = gm
  modified_base 54: mod_base = um
  modified_base 56: mod_base = cm
  modified_base 57: mod_base = OTHER; note = 2'-fluoro-guanine
  modified_base 59: mod_base = gm
  modified_base 61: mod_base = cm
  modified_base 62: mod_base = cm
  modified_base 63: mod_base = OTHER; note = 2'-fluoro-cytosine
  modified_base 64: mod_base = gm
  modified_base 65: mod_base = um
  modified_base 73: mod_base = gm

SEQ ID NO: 987 - RNA, 76 nt, synthetic construct; identical to SEQ ID NO: 641
  misc_feature 1..76: note = Description of sequence: tRNA-based effector molecule
  source 1..76: mol_type = other RNA
  modified_base 1: mod_base = gm
  modified_base 2: mod_base = cm
  modified_base 3: mod_base = cm
  modified_base 4: mod_base = um
  modified_base 5: mod_base = cm
  modified_base 6: mod_base = cm
  modified_base 14: mod_base = OTHER; note = 2'-O-methyladenine
  modified_base 15: mod_base = OTHER; note = 2'-O-methyladenine
  modified_base 16: mod_base = um
  modified_base 17: mod_base = gm
  modified_base 18: mod_base = gm
  modified_base 20: mod_base = um
  modified_base 25: mod_base = cm
  modified_base 33: mod_base = OTHER; note = 2'-fluoro-uracil
  modified_base 41: mod_base = OTHER; note = 2'-fluoro-cytosine
  modified_base 42: mod_base = OTHER; note = 2'-O-methyladenine
  modified_base 43: mod_base = cm
  modified_base 44: mod_base = OTHER; note = 2'-fluoro-adenine
  modified_base 49: mod_base = cm
  modified_base 50: mod_base = cm
  modified_base 52: mod_base = gm
  modified_base 54: mod_base = um
  modified_base 56: mod_base = cm
  modified_base 57: mod_base = OTHER; note = 2'-fluoro-guanine
  modified_base 59: mod_base = gm
  modified_base 61: mod_base = cm
  modified_base 62: mod_base = cm
  modified_base 63: mod_base = OTHER; note = 2'-fluoro-cytosine
  modified_base 64: mod_base = gm
  modified_base 65: mod_base = gm
  modified_base 73: mod_base = gm

SEQ ID NO: 988 - RNA, 76 nt, synthetic construct; identical to SEQ ID NO: 652
  misc_feature 1..76: note = Description of sequence: tRNA-based effector molecule
  source 1..76: mol_type = other RNA
  modified_base 1: mod_base = gm
  modified_base 2: mod_base = gm
  modified_base 3: mod_base = cm
  modified_base 4: mod_base = cm
  modified_base 5: mod_base = cm
  modified_base 6: mod_base = cm
  modified_base 14: mod_base = OTHER; note = 2'-O-methyladenine
  modified_base 15: mod_base = OTHER; note = 2'-O-methyladenine
  modified_base 16: mod_base = um
  modified_base 17: mod_base = gm
  modified_base 18: mod_base = gm
  modified_base 20: mod_base = um
  modified_base 25: mod_base = cm
  modified_base 33: mod_base = OTHER; note = 2'-fluoro-uracil
  modified_base 41: mod_base = OTHER; note = 2'-fluoro-cytosine
  modified_base 42: mod_base = OTHER; note = 2'-O-methyladenine
  modified_base 43: mod_base = OTHER; note = 2'-O-methyladenine
  modified_base 44: mod_base = OTHER; note = 2'-fluoro-adenine
  modified_base 49: mod_base = cm
  modified_base 50: mod_base = cm
  modified_base 52: mod_base = gm
  modified_base 54: mod_base = um
  modified_base 56: mod_base = cm
  modified_base 57: mod_base = OTHER; note = 2'-fluoro-guanine
  modified_base 59: mod_base = gm
  modified_base 61: mod_base = cm
  modified_base 62: mod_base = cm
  modified_base 63: mod_base = OTHER; note = 2'-fluoro-cytosine
  modified_base 64: mod_base = gm
  modified_base 65: mod_base = gm
  modified_base 73: mod_base = gm

SEQ ID NO: 989 - RNA, 76 nt, synthetic construct; identical to SEQ ID NO: 802
  misc_feature 1..76: note = Description of sequence: tRNA-based effector molecule
  source 1..76: mol_type = other RNA
  modified_base 1: mod_base = gm
  modified_base 2: mod_base = gm
  modified_base 3: mod_base = cm
  modified_base 4: mod_base = cm
  modified_base 5: mod_base = cm
  modified_base 6: mod_base = cm
  modified_base 14: mod_base = OTHER; note = 2'-O-methyladenine
  modified_base 15: mod_base = OTHER; note = 2'-O-methyladenine
  modified_base 16: mod_base = um
  modified_base 17: mod_base = gm
  modified_base 18: mod_base = gm
  modified_base 20: mod_base = um
  modified_base 25: mod_base = cm
  modified_base 33: mod_base = OTHER; note = 2'-fluoro-uracil
  modified_base 41: mod_base = OTHER; note = 2'-fluoro-cytosine
  modified_base 42: mod_base = OTHER; note = 2'-O-methyladenine
  modified_base 43: mod_base = OTHER; note = 2'-O-methyladenine
  modified_base 44: mod_base = OTHER; note = 2'-fluoro-adenine
  modified_base 49: mod_base = gm
  modified_base 50: mod_base = cm
  modified_base 52: mod_base = gm
  modified_base 54: mod_base = um
  modified_base 56: mod_base = cm
  modified_base 57: mod_base = OTHER; note = 2'-fluoro-guanine
  modified_base 59: mod_base = gm
  modified_base 61: mod_base = cm
  modified_base 62: mod_base = cm
  modified_base 63: mod_base = OTHER; note = 2'-fluoro-cytosine
  modified_base 64: mod_base = gm
  modified_base 65: mod_base = cm
  modified_base 73: mod_base = gm

SEQ ID NO: 990 - RNA, 76 nt, synthetic construct; identical to SEQ ID NO: 702
  misc_feature 1..76: note = Description of sequence: tRNA-based effector molecule
  source 1..76: mol_type = other RNA
  modified_base 1: mod_base = gm
  modified_base 2: mod_base = gm
  modified_base 3: mod_base = cm
  modified_base 4: mod_base = um
  modified_base 5: mod_base = cm
  modified_base 6: mod_base = cm
  modified_base 14: mod_base = OTHER; note = 2'-O-methyladenine
  modified_base 15: mod_base = OTHER; note = 2'-O-methyladenine
  modified_base 16: mod_base = um
  modified_base 17: mod_base = gm
  modified_base 18: mod_base = gm
  modified_base 20: mod_base = um
  modified_base 25: mod_base = cm
  modified_base 33: mod_base = OTHER; note = 2'-fluoro-uracil
  modified_base 41: mod_base = OTHER; note = 2'-fluoro-guanine
  modified_base 42: mod_base = gm
  modified_base 43: mod_base = um
  modified_base 44: mod_base = OTHER; note = 2'-fluoro-adenine
  modified_base 49: mod_base = cm
  modified_base 50: mod_base = cm
  modified_base 52: mod_base = gm
  modified_base 54: mod_base = um
  modified_base 56: mod_base = cm
  modified_base 57: mod_base = OTHER; note = 2'-fluoro-guanine
  modified_base 59: mod_base = gm
  modified_base 61: mod_base = cm
  modified_base 62: mod_base = cm
  modified_base 63: mod_base = OTHER; note = 2'-fluoro-cytosine
  modified_base 64: mod_base = gm
  modified_base 65: mod_base = gm
  modified_base 73: mod_base = gm

SEQ ID NO: 991 - RNA, 76 nt, synthetic construct; identical to SEQ ID NO: 710
  misc_feature 1..76: note = Description of sequence: tRNA-based effector molecule
  source 1..76: mol_type = other RNA
  modified_base 1: mod_base = gm
  modified_base 2: mod_base = gm
  modified_base 3: mod_base = cm
  modified_base 4: mod_base = um
  modified_base 5: mod_base = cm
  modified_base 6: mod_base = cm
  modified_base 14: mod_base = OTHER; note = 2'-O-methyladenine
  modified_base 15: mod_base = OTHER; note = 2'-O-methyladenine
  modified_base 16: mod_base = um
  modified_base 17: mod_base = gm
  modified_base 18: mod_base = gm
  modified_base 20: mod_base = um
  modified_base 25: mod_base = cm
  modified_base 33: mod_base = OTHER; note = 2'-fluoro-uracil
  modified_base 41: mod_base = OTHER; note = 2'-fluoro-cytosine
  modified_base 42: mod_base = gm
  modified_base 43: mod_base = OTHER; note = 2'-O-methyladenine
  modified_base 44: mod_base = OTHER; note = 2'-fluoro-adenine
  modified_base 49: mod_base = cm
  modified_base 50: mod_base = cm
  modified_base 52: mod_base = gm
  modified_base 54: mod_base = um
  modified_base 56: mod_base = cm
  modified_base 57: mod_base = OTHER; note = 2'-fluoro-guanine
  modified_base 59: mod_base = gm
  modified_base 61: mod_base = cm
  modified_base 62: mod_base = cm
  modified_base 63: mod_base = OTHER; note = 2'-fluoro-cytosine
  modified_base 64: mod_base = gm
  modified_base 65: mod_base = gm
  modified_base 73: mod_base = gm

SEQ ID NO: 992 - RNA, 76 nt, synthetic construct; identical to SEQ ID NO: 805
  misc_feature 1..76: note = Description of sequence: tRNA-based effector molecule
  source 1..76: mol_type = other RNA
  modified_base 1: mod_base = gm
  modified_base 2: mod_base = gm
  modified_base 3: mod_base = cm
  modified_base 4: mod_base = um
  modified_base 5: mod_base = cm
  modified_base 6: mod_base = cm
  modified_base 14: mod_base = OTHER; note = 2'-O-methyladenine
  modified_base 15: mod_base = OTHER; note = 2'-O-methyladenine
  modified_base 16: mod_base = um
  modified_base 17: mod_base = gm
  modified_base 18: mod_base = gm
  modified_base 20: mod_base = um
  modified_base 25: mod_base = cm
  modified_base 33: mod_base = OTHER; note = 2'-fluoro-uracil
  modified_base 41: mod_base = OTHER; note = 2'-fluoro-cytosine
  modified_base 42: mod_base = OTHER; note = 2'-O-methyladenine
  modified_base 43: mod_base = OTHER; note = 2'-O-methyladenine
  modified_base 44: mod_base = OTHER; note = 2'-fluoro-adenine
  modified_base 49: mod_base = gm
  modified_base 50: mod_base = cm
  modified_base 52: mod_base = gm
  modified_base 54: mod_base = um
  modified_base 56: mod_base = cm
  modified_base 57: mod_base = OTHER; note = 2'-fluoro-guanine
  modified_base 59: mod_base = gm
  modified_base 61: mod_base = cm
  modified_base 62: mod_base = cm
  modified_base 63: mod_base = OTHER; note = 2'-fluoro-cytosine
  modified_base 64: mod_base = gm
  modified_base 65: mod_base = cm
  modified_base 73: mod_base = gm

SEQ ID NO: 993 - RNA, 76 nt, synthetic construct; identical to SEQ ID NO: 743
  misc_feature 1..76: note = Description of sequence: tRNA-based effector molecule
  source 1..76: mol_type = other RNA
  modified_base 1: mod_base = gm
  modified_base 2: mod_base = gm
  modified_base 3: mod_base = cm
  modified_base 4: mod_base = um
  modified_base 5: mod_base = cm
  modified_base 6: mod_base = cm
  modified_base 14: mod_base = OTHER; note = 2'-O-methyladenine
  modified_base 15: mod_base = OTHER; note = 2'-O-methyladenine
  modified_base 16: mod_base = um
  modified_base 17: mod_base = gm
  modified_base 18: mod_base = gm
  modified_base 20: mod_base = um
  modified_base 25: mod_base = cm
  modified_base 33: mod_base = OTHER; note = 2'-fluoro-uracil
  modified_base 41: mod_base = OTHER; note = 2'-fluoro-cytosine
  modified_base 42: mod_base = OTHER; note = 2'-O-methyladenine
  modified_base 43: mod_base = OTHER; note = 2'-O-methyladenine
  modified_base 44: mod_base = OTHER; note = 2'-fluoro-guanine
  modified_base 49: mod_base = cm
  modified_base 50: mod_base = cm
  modified_base 52: mod_base = gm
  modified_base 54: mod_base = um
  modified_base 56: mod_base = cm
  modified_base 57: mod_base = OTHER; note = 2'-fluoro-guanine
  modified_base 59: mod_base = gm
  modified_base 61: mod_base = cm
  modified_base 62: mod_base = cm
  modified_base 63: mod_base = OTHER; note = 2'-fluoro-cytosine
  modified_base 64: mod_base = gm
  modified_base 65: mod_base = gm
  modified_base 73: mod_base = gm

SEQ ID NO: 994 - RNA, 76 nt, synthetic construct; identical to SEQ ID NO: 794
  misc_feature 1..76: note = Description of sequence: tRNA-based effector molecule
  source 1..76: mol_type = other RNA
  modified_base 1: mod_base = um
  modified_base 2: mod_base = OTHER; note = 2'-O-methyladenine
  modified_base 3: mod_base = cm
  modified_base 4: mod_base = OTHER; note = 2'-O-methyladenine
  modified_base 5: mod_base = cm
  modified_base 6: mod_base = cm
  modified_base 14: mod_base = OTHER; note = 2'-O-methyladenine
  modified_base 15: mod_base = OTHER; note = 2'-O-methyladenine
  modified_base 16: mod_base = um
  modified_base 17: mod_base = gm
  modified_base 18: mod_base = gm
  modified_base 20: mod_base = um
  modified_base 25: mod_base = cm
  modified_base 33: mod_base = OTHER; note = 2'-fluoro-uracil
  modified_base 41: mod_base = OTHER; note = 2'-fluoro-cytosine
  modified_base 42: mod_base = OTHER; note = 2'-O-methyladenine
  modified_base 43: mod_base = OTHER; note = 2'-O-methyladenine
  modified_base 44: mod_base = OTHER; note = 2'-fluoro-adenine
  modified_base 49: mod_base = cm
  modified_base 50: mod_base = cm
  modified_base 52: mod_base = gm
  modified_base 54: mod_base = um
  modified_base 56: mod_base = cm
  modified_base 57: mod_base = OTHER; note = 2'-fluoro-guanine
  modified_base 59: mod_base = gm
  modified_base 61: mod_base = cm
  modified_base 62: mod_base = cm
  modified_base 63: mod_base = OTHER; note = 2'-fluoro-cytosine
  modified_base 64: mod_base = gm
  modified_base 65: mod_base = gm
  modified_base 73: mod_base = gm

SEQ ID NO: 995 - RNA, 76 nt, synthetic construct; identical to SEQ ID NO: 627
  misc_feature 1..76: note = Description of sequence: tRNA-based effector molecule
  source 1..76: mol_type = other RNA
  modified_base 1: mod_base = OTHER; note = 2'-O-methyladenine
  modified_base 2: mod_base = cm
  modified_base 3: mod_base = cm
  modified_base 4: mod_base = OTHER; note = 2'-O-methyladenine
  modified_base 5: mod_base = OTHER; note = 2'-O-methyladenine
  modified_base 6: mod_base = cm
  modified_base 13: mod_base = cm
  modified_base 14: mod_base = OTHER; note = 2'-O-methyladenine
  modified_base 15: mod_base = OTHER; note = 2'-O-methyladenine
  modified_base 16: mod_base = um
  modified_base 17: mod_base = gm
  modified_base 18: mod_base = gm
  modified_base 20: mod_base = um
  modified_base 25: mod_base = cm
  modified_base 34: mod_base = um
  modified_base 49: mod_base = cm
  modified_base 50: mod_base = cm
  modified_base 51: mod_base = gm
  modified_base 52: mod_base = gm
  modified_base 53: mod_base = gm
  modified_base 61: mod_base = cm
  modified_base 65: mod_base = gm
  modified_base 73: mod_base = gm

SEQ ID NO: 996 - RNA, 76 nt, synthetic construct; identical to SEQ ID NO: 639
  misc_feature 1..76: note = Description of sequence: tRNA-based effector molecule
  source 1..76: mol_type = other RNA
  modified_base 1: mod_base = gm
  modified_base 2: mod_base = cm
  modified_base 3: mod_base = cm
  modified_base 4: mod_base = cm
  modified_base 5: mod_base = gm
  modified_base 6: mod_base = OTHER; note = 2'-O-methyladenine
  modified_base 13: mod_base = cm
  modified_base 14: mod_base = OTHER; note = 2'-O-methyladenine
  modified_base 15: mod_base = OTHER; note = 2'-O-methyladenine
  modified_base 16: mod_base = um
  modified_base 17: mod_base = gm
  modified_base 18: mod_base = gm
  modified_base 20: mod_base = um
  modified_base 25: mod_base = cm
  modified_base 34: mod_base = um
  modified_base 49: mod_base = cm
  modified_base 50: mod_base = cm
  modified_base 51: mod_base = gm
  modified_base 52: mod_base = gm
  modified_base 53: mod_base = gm
  modified_base 61: mod_base = cm
  modified_base 65: mod_base = gm
  modified_base 73: mod_base = gm

SEQ ID NO: 997 - RNA, 76 nt, synthetic construct; identical to SEQ ID NO: 799
  misc_feature 1..76: note = Description of sequence: tRNA-based effector molecule
  source 1..76: mol_type = other RNA
  modified_base 1: mod_base = gm
  modified_base 2: mod_base = cm
  modified_base 3: mod_base = cm
  modified_base 4: mod_base = um
  modified_base 5: mod_base = cm
  modified_base 6: mod_base = cm
  modified_base 13: mod_base = um
  modified_base 14: mod_base = OTHER; note = 2'-O-methyladenine
  modified_base 15: mod_base = OTHER; note = 2'-O-methyladenine
  modified_base 16: mod_base = um
  modified_base 17: mod_base = gm
  modified_base 18: mod_base = gm
  modified_base 20: mod_base = um
  modified_base 25: mod_base = cm
  modified_base 34: mod_base = um
  modified_base 49: mod_base = gm
  modified_base 50: mod_base = cm
  modified_base 51: mod_base = gm
  modified_base 52: mod_base = gm
  modified_base 53: mod_base = gm
  modified_base 61: mod_base = cm
  modified_base 65: mod_base = um
  modified_base 73: mod_base = gm

SEQ ID NO: 998 - RNA, 76 nt, synthetic construct; identical to SEQ ID NO: 641
  misc_feature 1..76: note = Description of sequence: tRNA-based effector molecule
  source 1..76: mol_type = other RNA
  modified_base 1: mod_base = gm
  modified_base 2: mod_base = cm
  modified_base 3: mod_base = cm
  modified_base 4: mod_base = um
  modified_base 5: mod_base = cm
  modified_base 6: mod_base = cm
  modified_base 13: mod_base = cm
  modified_base 14: mod_base = OTHER; note = 2'-O-methyladenine
  modified_base 15: mod_base = OTHER; note = 2'-O-methyladenine
  modified_base 16: mod_base = um
  modified_base 17: mod_base = gm
  modified_base 18: mod_base = gm
  modified_base 20: mod_base = um
  modified_base 25: mod_base = cm
  modified_base 34: mod_base = um
  modified_base 49: mod_base = cm
  modified_base 50: mod_base = cm
  modified_base 51: mod_base = gm
  modified_base 52: mod_base = gm
  modified_base 53: mod_base = gm
  modified_base 61: mod_base = cm
  modified_base 65: mod_base = gm
  modified_base 73: mod_base = gm

SEQ ID NO: 999 - RNA, 76 nt, synthetic construct; identical to SEQ ID NO: 652
  misc_feature 1..76: note = Description of sequence: tRNA-based effector molecule
  source 1..76: mol_type = other RNA
  modified_base 1: mod_base = gm
  modified_base 2: mod_base = gm
  modified_base 3: mod_base = cm
  modified_base 4: mod_base = cm
  modified_base 5: mod_base = cm
  modified_base 6: mod_base = cm
  modified_base 13: mod_base = cm
  modified_base 14: mod_base = OTHER; note = 2'-O-methyladenine
  modified_base 15: mod_base = OTHER; note = 2'-O-methyladenine
  modified_base 16: mod_base = um
  modified_base 17: mod_base = gm
  modified_base 18: mod_base = gm
  modified_base 20: mod_base = um
  modified_base 25: mod_base = cm
  modified_base 34: mod_base = um
  modified_base 49: mod_base = cm
  modified_base 50: mod_base = cm
  modified_base 51: mod_base = gm
  modified_base 52: mod_base = gm
  modified_base 53: mod_base = gm
  modified_base 61: mod_base = cm
  modified_base 65: mod_base = gm
  modified_base 73: mod_base = gm

SEQ ID NO: 1000 - RNA, 76 nt, synthetic construct; identical to SEQ ID NO: 802
  misc_feature 1..76: note = Description of sequence: tRNA-based effector molecule
  source 1..76: mol_type = other RNA
  modified_base 1: mod_base = gm
  modified_base 2: mod_base = gm
  modified_base 3: mod_base = cm
  modified_base 4: mod_base = cm
  modified_base 5: mod_base = cm
  modified_base 6: mod_base = cm
  modified_base 13: mod_base = cm
  modified_base 14: mod_base = OTHER; note = 2'-O-methyladenine
  modified_base 15: mod_base = OTHER; note = 2'-O-methyladenine
  modified_base 16: mod_base = um
  modified_base 17: mod_base = gm
  modified_base 18: mod_base = gm
  modified_base 20: mod_base = um
  modified_base 25: mod_base = cm
  modified_base 34: mod_base = um
  modified_base 49: mod_base = gm
  modified_base 50: mod_base = cm
  modified_base 51: mod_base = gm
  modified_base 52: mod_base = gm
  modified_base 53: mod_base = gm
  modified_base 61: mod_base = cm
  modified_base 65: mod_base = cm
  modified_base 73: mod_base = gm

SEQ ID NO: 1001 - RNA, 76 nt, synthetic construct; identical to SEQ ID NO: 702
  misc_feature 1..76: note = Description of sequence: tRNA-based effector molecule
  source 1..76: mol_type = other RNA
  modified_base 1: mod_base = gm
  modified_base 2: mod_base = gm
  modified_base 3: mod_base = cm
  modified_base 4: mod_base = um
  modified_base 5: mod_base = cm
  modified_base 6: mod_base = cm
  modified_base 13: mod_base = cm
  modified_base 14: mod_base = OTHER; note = 2'-O-methyladenine
  modified_base 15: mod_base = OTHER; note = 2'-O-methyladenine
  modified_base 16: mod_base = um
  modified_base 17: mod_base = gm
  modified_base 18: mod_base = gm
  modified_base 20: mod_base = um
  modified_base 25: mod_base = cm
  modified_base 34: mod_base = um
  modified_base 49: mod_base = cm
  modified_base 50: mod_base = cm
  modified_base 51: mod_base = gm
  modified_base 52: mod_base = gm
  modified_base 53: mod_base = gm
  modified_base 61: mod_base = cm
  modified_base 65: mod_base = gm
  modified_base 73: mod_base = gm

SEQ ID NO: 1002 - RNA, 76 nt, synthetic construct; identical to SEQ ID NO: 710
  misc_feature 1..76: note = Description of sequence: tRNA-based effector molecule
  source 1..76: mol_type = other RNA
  modified_base 1: mod_base = gm
  modified_base 2: mod_base = gm
  modified_base 3: mod_base = cm
  modified_base 4: mod_base = um
  modified_base 5: mod_base = cm
  modified_base 6: mod_base = cm
  modified_base 13: mod_base = cm
  modified_base 14: mod_base = OTHER; note = 2'-O-methyladenine
  modified_base 15: mod_base = OTHER; note = 2'-O-methyladenine
  modified_base 16: mod_base = um
  modified_base 17: mod_base = gm
  modified_base 18: mod_base = gm
  modified_base 20: mod_base = um
  modified_base 25: mod_base = cm
  modified_base 34: mod_base = um
  modified_base 49: mod_base = cm
  modified_base 50: mod_base = cm
  modified_base 51: mod_base = gm
  modified_base 52: mod_base = gm
  modified_base 53: mod_base = gm
  modified_base 61: mod_base = cm
  modified_base 65: mod_base = gm
  modified_base 73: mod_base = gm

SEQ ID NO: 1003 - RNA, 76 nt, synthetic construct; identical to SEQ ID NO: 805
  misc_feature 1..76: note = Description of sequence: tRNA-based effector molecule
  source 1..76: mol_type = other RNA
  modified_base 1: mod_base = gm
  modified_base 2: mod_base = gm
  modified_base 3: mod_base = cm
  modified_base 4: mod_base = um
  modified_base 5: mod_base = cm
  modified_base 6: mod_base = cm
  modified_base 13: mod_base = cm
  modified_base 14: mod_base = OTHER; note = 2'-O-methyladenine
  modified_base 15: mod_base = OTHER; note = 2'-O-methyladenine
  modified_base 16: mod_base = um
  modified_base 17: mod_base = gm
  modified_base 18: mod_base = gm
  modified_base 20: mod_base = um
  modified_base 25: mod_base = cm
  modified_base 34: mod_base = um
  modified_base 49: mod_base = gm
  modified_base 50: mod_base = cm
  modified_base 51: mod_base = gm
  modified_base 52: mod_base = gm
  modified_base 53: mod_base = gm
  modified_base 61: mod_base = cm
  modified_base 65: mod_base = cm
  modified_base 73: mod_base = gm

SEQ ID NO: 1004 - RNA, 76 nt, synthetic construct; identical to SEQ ID NO: 743
  misc_feature 1..76: note = Description of sequence: tRNA-based effector molecule
  source 1..76: mol_type = other RNA
  modified_base 1: mod_base = gm
  modified_base 2: mod_base = gm
  modified_base 3: mod_base = cm
  modified_base 4: mod_base = um
  modified_base 5: mod_base = cm
  modified_base 6: mod_base = cm
  modified_base 13: mod_base = cm
  modified_base 14: mod_base = OTHER; note = 2'-O-methyladenine
  modified_base 15: mod_base = OTHER; note = 2'-O-methyladenine
  modified_base 16: mod_base = um
  modified_base 17: mod_base = gm
  modified_base 18: mod_base = gm
  modified_base 20: mod_base = um
  modified_base 25: mod_base = cm
  modified_base 34: mod_base = um
  modified_base 49: mod_base = cm
  modified_base 50: mod_base = cm
  modified_base 51: mod_base = gm
  modified_base 52: mod_base = gm
  modified_base 53: mod_base = gm
  modified_base 61: mod_base = cm
  modified_base 65: mod_base = gm
  modified_base 73: mod_base = gm

SEQ ID NO: 1005 - RNA, 76 nt, synthetic construct; identical to SEQ ID NO: 794
  misc_feature 1..76: note = Description of sequence: tRNA-based effector molecule
  source 1..76: mol_type = other RNA
  modified_base 1: mod_base = um
  modified_base 2: mod_base = OTHER; note = 2'-O-methyladenine
  modified_base 3: mod_base = cm
  modified_base 4: mod_base = OTHER; note = 2'-O-methyladenine
  modified_base 5: mod_base = cm
  modified_base 6: mod_base = cm
  modified_base 13: mod_base = cm
  modified_base 14: mod_base = OTHER; note = 2'-O-methyladenine
  modified_base 15: mod_base = OTHER; note = 2'-O-methyladenine
  modified_base 16: mod_base = um
  modified_base 17: mod_base = gm
  modified_base 18: mod_base = gm
  modified_base 20: mod_base = um
  modified_base 25: mod_base = cm
  modified_base 34: mod_base = um
  modified_base 49: mod_base = cm
  modified_base 50: mod_base = cm
  modified_base 51: mod_base = gm
  modified_base 52: mod_base = gm
  modified_base 53: mod_base = gm
  modified_base 61: mod_base = cm
  modified_base 65: mod_base = gm
  modified_base 73: mod_base = gm

SEQ ID NO: 1006 - RNA, 76 nt, synthetic construct; identical to SEQ ID NO: 627
  misc_feature 1..76: note = Description of sequence: tRNA-based effector molecule
  source 1..76: mol_type = other RNA
  modified_base 1: mod_base = OTHER; note = 2'-O-methyladenine
  modified_base 2: mod_base = cm
  modified_base 3: mod_base = cm
  modified_base 4: mod_base = OTHER; note = 2'-O-methyladenine
  modified_base 5: mod_base = OTHER; note = 2'-O-methyladenine
  modified_base 6: mod_base = cm
  modified_base 10: mod_base = gm
  modified_base 11: mod_base = cm
  modified_base 12: mod_base = gm
  modified_base 13: mod_base = cm
  modified_base 16: mod_base = um
  modified_base 17: mod_base = gm
  modified_base 18: mod_base = gm
  modified_base 20: mod_base = um
  modified_base 25: mod_base = cm
  modified_base 33: mod_base = OTHER; note = 2'-fluoro-uracil
  modified_base 41: mod_base = OTHER; note = 2'-fluoro-cytosine
  modified_base 42: mod_base = OTHER; note = 2'-O-methyladenine
  modified_base 43: mod_base = OTHER; note = 2'-O-methyladenine
  modified_base 44: mod_base = OTHER; note = 2'-fluoro-adenine
  modified_base 49: mod_base = cm
  modified_base 50: mod_base = cm
  modified_base 52: mod_base = gm
  modified_base 54: mod_base = um
  modified_base 56: mod_base = cm
  modified_base 57: mod_base = OTHER; note = 2'-fluoro-guanine
  modified_base 59: mod_base = gm
  modified_base 61: mod_base = cm
  modified_base 65: mod_base = gm
  modified_base 73: mod_base = gm

SEQ ID NO: 1007 - RNA, 76 nt, synthetic construct; identical to SEQ ID NO: 639
  misc_feature 1..76: note = Description of sequence: tRNA-based effector molecule
  source 1..76: mol_type = other RNA
  modified_base 1: mod_base = gm
  modified_base 2: mod_base = cm
  modified_base 3: mod_base = cm
  modified_base 4: mod_base = cm
  modified_base 5: mod_base = gm
  modified_base 6: mod_base = OTHER; note = 2'-O-methyladenine
  modified_base 10: mod_base = gm
  modified_base 11: mod_base = cm
  modified_base 12: mod_base = gm
  modified_base 13: mod_base = cm
  modified_base 16: mod_base = um
  modified_base 17: mod_base = gm
  modified_base 18: mod_base = gm
  modified_base 20: mod_base = um
  modified_base 25: mod_base = cm
  modified_base 33: mod_base = OTHER; note = 2'-fluoro-uracil
  modified_base 41: mod_base = OTHER; note = 2'-fluoro-cytosine
  modified_base 42: mod_base = OTHER; note = 2'-O-methyladenine
  modified_base 43: mod_base = OTHER; note = 2'-O-methyladenine
  modified_base 44: mod_base = OTHER; note = 2'-fluoro-adenine
  modified_base 49: mod_base = cm
  modified_base 50: mod_base = cm
  modified_base 52: mod_base = gm
  modified_base 54: mod_base = um
  modified_base 56: mod_base = cm
  modified_base 57: mod_base = OTHER; note = 2'-fluoro-guanine
  modified_base 59: mod_base = gm
  modified_base 61: mod_base = cm
  modified_base 65: mod_base = gm
  modified_base 73: mod_base = gm

SEQ ID NO: 1008 - RNA, 76 nt, synthetic construct; identical to SEQ ID NO: 799
  misc_feature 1..76: note = Description of sequence: tRNA-based effector molecule
  source 1..76: mol_type = other RNA
  modified_base 1: mod_base = gm
  modified_base 2: mod_base = cm
  modified_base 3: mod_base = cm
  modified_base 4: mod_base = um
  modified_base 5: mod_base = cm
  modified_base 6: mod_base = cm
  modified_base 10: mod_base = gm
  modified_base 11: mod_base = cm
  modified_base 12: mod_base = cm
  modified_base 13: mod_base = um
  modified_base 16: mod_base = um
  modified_base 17: mod_base = gm
  modified_base 18: mod_base = gm
  modified_base 20: mod_base = um
  modified_base 25: mod_base = cm
  modified_base 33: mod_base = OTHER; note = 2'-fluoro-uracil
  modified_base 41: mod_base = OTHER; note = 2'-fluoro-cytosine
  modified_base 42: mod_base = gm
  modified_base 43: mod_base = gm
  modified_base 44: mod_base = OTHER; note = 2'-fluoro-guanine
  modified_base 49: mod_base = gm
  modified_base 50: mod_base = cm
  modified_base 52: mod_base = gm
  modified_base 54: mod_base = um
  modified_base 56: mod_base = cm
  modified_base 57: mod_base = OTHER; note = 2'-fluoro-guanine
  modified_base 59: mod_base = gm
  modified_base 61: mod_base = cm
  modified_base 65: mod_base = um
  modified_base 73: mod_base = gm

SEQ ID NO: 1009 - RNA, 76 nt, synthetic construct; identical to SEQ ID NO: 641
  misc_feature 1..76: note = Description of sequence: tRNA-based effector molecule
  source 1..76: mol_type = other RNA
  modified_base 1: mod_base = gm
  modified_base 2: mod_base = cm
  modified_base 3: mod_base = cm
  modified_base 4: mod_base = um
  modified_base 5: mod_base = cm
  modified_base 6: mod_base = cm
  modified_base 10: mod_base = gm
  modified_base 11: mod_base = cm
  modified_base 12: mod_base = gm
  modified_base 13: mod_base = cm
  modified_base 16: mod_base = um
  modified_base 17: mod_base = gm
  modified_base 18: mod_base = gm
  modified_base 20: mod_base = um
  modified_base 25: mod_base = cm
  modified_base 33: mod_base = OTHER; note = 2'-fluoro-uracil
  modified_base 41: mod_base = OTHER; note = 2'-fluoro-cytosine
  modified_base 42: mod_base = OTHER; note = 2'-O-methyladenine
  modified_base 43: mod_base = cm
  modified_base 44: mod_base = OTHER; note = 2'-fluoro-adenine
  modified_base 49: mod_base = cm
  modified_base 50: mod_base = cm
  modified_base 52: mod_base = gm
  modified_base 54: mod_base = um
  modified_base 56: mod_base = cm
  modified_base 57: mod_base = OTHER; note = 2'-fluoro-guanine
  modified_base 59: mod_base = gm
  modified_base 61: mod_base = cm
  modified_base 65: mod_base = gm
  modified_base 73: mod_base = gm

SEQ ID NO: 1010 - RNA, 76 nt, synthetic construct; identical to SEQ ID NO: 652
  misc_feature 1..76: note = Description of sequence: tRNA-based effector molecule
  source 1..76: mol_type = other RNA
  modified_base 1: mod_base = gm
  modified_base 2: mod_base = gm
  modified_base 3: mod_base = cm
  modified_base 4: mod_base = cm
  modified_base 5: mod_base = cm
  modified_base 6: mod_base = cm
  modified_base 10: mod_base = gm
  modified_base 11: mod_base = cm
  modified_base 12: mod_base = gm
  modified_base 13: mod_base = cm
  modified_base 16: mod_base = um
  modified_base 17: mod_base = gm
  modified_base 18: mod_base = gm
  modified_base 20: mod_base = um
  modified_base 25: mod_base = cm
  modified_base 33: mod_base = OTHER; note = 2'-fluoro-uracil
  modified_base 41: mod_base = OTHER; note = 2'-fluoro-cytosine
  modified_base 42: mod_base = OTHER; note = 2'-O-methyladenine
  modified_base 43: mod_base = OTHER; note = 2'-O-methyladenine
  modified_base 44: mod_base = OTHER; note = 2'-fluoro-adenine
  modified_base 49: mod_base = cm
  modified_base 50: mod_base = cm
  modified_base 52: mod_base = gm
  modified_base 54: mod_base = um
  modified_base 56: mod_base = cm
  modified_base 57: mod_base = OTHER; note = 2'-fluoro-guanine
  modified_base 59: mod_base = gm
  modified_base 61: mod_base = cm
  modified_base 65: mod_base = gm
  modified_base 73: mod_base = gm

SEQ ID NO: 1011 - RNA, 76 nt, synthetic construct; identical to SEQ ID NO: 802
  misc_feature 1..76: note = Description of sequence: tRNA-based effector molecule
  source 1..76: mol_type = other RNA
  modified_base 1: mod_base = gm
  modified_base 2: mod_base = gm
  modified_base 3: mod_base = cm
  modified_base 4: mod_base = cm
  modified_base 5: mod_base = cm
  modified_base 6: mod_base = cm
  modified_base 10: mod_base = gm
  modified_base 11: mod_base = cm
  modified_base 12: mod_base = gm
  modified_base 13: mod_base = cm
  modified_base 16: mod_base = um
  modified_base 17: mod_base = gm
  modified_base 18: mod_base = gm
  modified_base 20: mod_base = um
  modified_base 25: mod_base = cm
  modified_base 33: mod_base = OTHER; note = 2'-fluoro-uracil
  modified_base 41: mod_base = OTHER; note = 2'-fluoro-cytosine
  modified_base 42: mod_base = OTHER; note = 2'-O-methyladenine
  modified_base 43: mod_base = OTHER; note = 2'-O-methyladenine
  modified_base 44: mod_base = OTHER; note = 2'-fluoro-adenine
  modified_base 49: mod_base = gm
  modified_base 50: mod_base = cm
  modified_base 52: mod_base = gm
  modified_base 54: mod_base = um
  modified_base 56: mod_base = cm
  modified_base 57: mod_base = OTHER; note = 2'-fluoro-guanine
  modified_base 59: mod_base = gm
  modified_base 61: mod_base = cm
  modified_base 65: mod_base = cm
  modified_base 73: mod_base = gm

SEQ ID NO: 1012 - RNA, 76 nt, synthetic construct; identical to SEQ ID NO: 702
  misc_feature 1..76: note = Description of sequence: tRNA-based effector molecule
  source 1..76: mol_type = other RNA
  modified_base 1: mod_base = gm
  modified_base 2: mod_base = gm
  modified_base 3: mod_base = cm
  modified_base 4: mod_base = um
  modified_base 5: mod_base = cm
  modified_base 6: mod_base = cm
  modified_base 10: mod_base = gm
  modified_base 11: mod_base = cm
  modified_base 12: mod_base = gm
  modified_base 13: mod_base = cm
  modified_base 16: mod_base = um
  modified_base 17: mod_base = gm
  modified_base 18: mod_base = gm
  modified_base 20: mod_base = um
  modified_base 25: mod_base = cm
  modified_base 33: mod_base = OTHER; note = 2'-fluoro-uracil
  modified_base 41: mod_base = OTHER; note = 2'-fluoro-guanine
  modified_base 42: mod_base = gm
  modified_base 43: mod_base = um
  modified_base 44: mod_base = OTHER; note = 2'-fluoro-adenine
  modified_base 49: mod_base = cm
  modified_base 50: mod_base = cm
  modified_base 52: mod_base = gm
  modified_base 54: mod_base = um
  modified_base 56: mod_base = cm
  modified_base 57: mod_base = OTHER; note = 2'-fluoro-guanine
  modified_base 59: mod_base = gm
  modified_base 61: mod_base = cm
  modified_base 65: mod_base = gm
  modified_base 73: mod_base = gm

SEQ ID NO: 1013 - RNA, 76 nt, synthetic construct; identical to SEQ ID NO: 710
  misc_feature 1..76: note = Description of sequence: tRNA-based effector molecule
  source 1..76: mol_type = other RNA
  modified_base 1: mod_base = gm
  modified_base 2: mod_base = gm
  modified_base 3: mod_base = cm
  modified_base 4: mod_base = um
  modified_base 5: mod_base = cm
  modified_base 6: mod_base = cm
  modified_base 10: mod_base = gm
  modified_base 11: mod_base = cm
  modified_base 12: mod_base = gm
  modified_base 13: mod_base = cm
  modified_base 16: mod_base = um
  modified_base 17: mod_base = gm
  modified_base 18: mod_base = gm
  modified_base 20: mod_base = um
  modified_base 25: mod_base = cm
  modified_base 33: mod_base = OTHER; note = 2'-fluoro-uracil
  modified_base 41: mod_base = OTHER; note = 2'-fluoro-cytosine
  modified_base 42: mod_base = gm
  modified_base 43: mod_base = OTHER; note = 2'-O-methyladenine
  modified_base 44: mod_base = OTHER; note = 2'-fluoro-adenine
  modified_base 49: mod_base = cm
  modified_base 50: mod_base = cm
  modified_base 52: mod_base = gm
  modified_base 54: mod_base = um
  modified_base 56: mod_base = cm
  modified_base 57: mod_base = OTHER; note = 2'-fluoro-guanine
  modified_base 59: mod_base = gm
  modified_base 61: mod_base = cm
  modified_base 65: mod_base = gm
  modified_base 73: mod_base = gm

SEQ ID NO: 1014 - RNA, 76 nt, synthetic construct; identical to SEQ ID NO: 805
  misc_feature 1..76: note = Description of sequence: tRNA-based effector molecule
  source 1..76: mol_type = other RNA
  modified_base 1: mod_base = gm
  modified_base 2: mod_base = gm
  modified_base 3: mod_base = cm
  modified_base 4: mod_base = um
  modified_base 5: mod_base = cm
  modified_base 6: mod_base = cm
  modified_base 10: mod_base = gm
  modified_base 11: mod_base = cm
  modified_base 12: mod_base = gm
  modified_base 13: mod_base = cm
  modified_base 16: mod_base = um
  modified_base 17: mod_base = gm
  modified_base 18: mod_base = gm
  modified_base 20: mod_base = um
  modified_base 25: mod_base = cm
  modified_base 33: mod_base = OTHER; note = 2'-fluoro-uracil
  modified_base 41: mod_base = OTHER; note = 2'-fluoro-cytosine
  modified_base 42: mod_base = OTHER; note = 2'-O-methyladenine
  modified_base 43: mod_base = OTHER; note = 2'-O-methyladenine
  modified_base 44: mod_base = OTHER; note = 2'-fluoro-adenine
  modified_base 49: mod_base = gm
  modified_base 50: mod_base = cm
  modified_base 52: mod_base = gm
  modified_base 54: mod_base = um
  modified_base 56: mod_base = cm
  modified_base 57: mod_base = OTHER; note = 2'-fluoro-guanine
  modified_base 59: mod_base = gm
  modified_base 61: mod_base = cm
  modified_base 65: mod_base = cm
  modified_base 73: mod_base = gm

SEQ ID NO: 1015 - RNA, 76 nt, synthetic construct; identical to SEQ ID NO: 743
  misc_feature 1..76: note = Description of sequence: tRNA-based effector molecule
  source 1..76: mol_type = other RNA
  modified_base 1: mod_base = gm
  modified_base 2: mod_base = gm
  modified_base 3: mod_base = cm
  modified_base 4: mod_base = um
  modified_base 5: mod_base = cm
  modified_base 6: mod_base = cm
  modified_base 10: mod_base = gm
  modified_base 11: mod_base = cm
  modified_base 12: mod_base = gm
  modified_base 13: mod_base = cm
  modified_base 16: mod_base = um
  modified_base 17: mod_base = gm
  modified_base 18: mod_base = gm
  modified_base 20: mod_base = um
  modified_base 25: mod_base = cm
  modified_base 33: mod_base = OTHER; note = 2'-fluoro-uracil
  modified_base 41: mod_base = OTHER; note = 2'-fluoro-cytosine
  modified_base 42: mod_base = OTHER; note = 2'-O-methyladenine
  modified_base 43: mod_base = OTHER; note = 2'-O-methyladenine
  modified_base 44: mod_base = OTHER; note = 2'-fluoro-guanine
  modified_base 49: mod_base = cm
  modified_base 50: mod_base = cm
  modified_base 52: mod_base = gm
  modified_base 54: mod_base = um
  modified_base 56: mod_base = cm
  modified_base 57: mod_base = OTHER; note = 2'-fluoro-guanine
  modified_base 59: mod_base = gm
  modified_base 61: mod_base = cm
  modified_base 65: mod_base = gm
  modified_base 73: mod_base = gm

SEQ ID NO: 1016 - RNA, 76 nt, synthetic construct; identical to SEQ ID NO: 794
  misc_feature 1..76: note = Description of sequence: tRNA-based effector molecule
  source 1..76: mol_type = other RNA
  modified_base 1: mod_base = um
  modified_base 2: mod_base = OTHER; note = 2'-O-methyladenine
  modified_base 3: mod_base = cm
  modified_base 4: mod_base = OTHER; note = 2'-O-methyladenine
  modified_base 5: mod_base = cm
  modified_base 6: mod_base = cm
  modified_base 10: mod_base = gm
  modified_base 11: mod_base = cm
  modified_base 12: mod_base = gm
  modified_base 13: mod_base = cm
  modified_base 16: mod_base = um
  modified_base 17: mod_base = gm
  modified_base 18: mod_base = gm
  modified_base 20: mod_base = um
  modified_base 25: mod_base = cm
  modified_base 33: mod_base = OTHER; note = 2'-fluoro-uracil
  modified_base 41: mod_base = OTHER; note = 2'-fluoro-cytosine
  modified_base 42: mod_base = OTHER; note = 2'-O-methyladenine
  modified_base 43: mod_base = OTHER; note = 2'-O-methyladenine
  modified_base 44: mod_base = OTHER; note = 2'-fluoro-adenine
  modified_base 49: mod_base = cm
  modified_base 50: mod_base = cm
  modified_base 52: mod_base = gm
  modified_base 54: mod_base = um
  modified_base 56: mod_base = cm
  modified_base 57: mod_base = OTHER; note = 2'-fluoro-guanine
  modified_base 59: mod_base = gm
  modified_base 61: mod_base = cm
  modified_base 65: mod_base = gm
  modified_base 73: mod_base = gm

SEQ ID NO: 1017 - RNA, 76 nt, synthetic construct; identical to SEQ ID NO: 627
  misc_feature 1..76: note = Description of sequence: tRNA-based effector molecule
  source 1..76: mol_type = other RNA
  modified_base 1: mod_base = OTHER; note = 2'-O-methyladenine
  modified_base 2: mod_base = cm
  modified_base 3: mod_base = cm
  modified_base 4: mod_base = OTHER; note = 2'-O-methyladenine
  modified_base 5: mod_base = OTHER; note = 2'-O-methyladenine
  modified_base 6: mod_base = cm
  modified_base 10: mod_base = gm
  modified_base 11: mod_base = cm
  modified_base 12: mod_base = gm
  modified_base 13: mod_base = cm
  modified_base 14: mod_base = OTHER; note = 2'-O-methyladenine
  modified_base 15: mod_base = OTHER; note = 2'-fluoro-adenine
  modified_base 16: mod_base = um
  modified_base 17: mod_base = gm
  modified_base 18: mod_base = gm
  modified_base 19: mod_base = OTHER; note = 2'-fluoro-adenine
  modified_base 20: mod_base = um
  modified_base 25: mod_base = cm
  modified_base 33: mod_base = OTHER; note = 2'-fluoro-uracil
  modified_base 41: mod_base = cm
  modified_base 42: mod_base = OTHER; note = 2'-O-methyladenine
  modified_base 43: mod_base = OTHER; note = 2'-O-methyladenine
  modified_base 44: mod_base = OTHER; note = 2'-O-methyladenine
  modified_base 49: mod_base = cm
  modified_base 50: mod_base = cm
  modified_base 52: mod_base = gm
  modified_base 54: mod_base = um
  modified_base 56: mod_base = cm
  modified_base 57: mod_base = OTHER; note = 2'-fluoro-guanine
  modified_base 59: mod_base = gm
  modified_base 61: mod_base = cm
  modified_base 65: mod_base = gm
  modified_base 73: mod_base = gm

SEQ ID NO: 1018 - RNA, 76 nt, synthetic construct; identical to SEQ ID NO: 639
  misc_feature 1..76: note = Description of sequence: tRNA-based effector molecule
  source 1..76: mol_type = other RNA
  modified_base 1: mod_base = gm
  modified_base 2: mod_base = cm
  modified_base 3: mod_base = cm
  modified_base 4: mod_base = cm
  modified_base 5: mod_base = gm
  modified_base 6: mod_base = OTHER; note = 2'-O-methyladenine
  modified_base 10: mod_base = gm
  modified_base 11: mod_base = cm
  modified_base 12: mod_base = gm
  modified_base 13: mod_base = cm
  modified_base 14: mod_base = OTHER; note = 2'-O-methyladenine
  modified_base 15: mod_base = OTHER; note = 2'-fluoro-adenine
  modified_base 16: mod_base = um
  modified_base 17: mod_base = gm
  modified_base 18: mod_base = gm
  modified_base 19: mod_base = OTHER; note = 2'-fluoro-adenine
  modified_base 20: mod_base = um
  modified_base 25: mod_base = cm
  modified_base 33: mod_base = OTHER; note = 2'-fluoro-uracil
  modified_base 41: mod_base = cm
  modified_base 42: mod_base = OTHER; note = 2'-O-methyladenine
  modified_base 43: mod_base = OTHER; note = 2'-O-methyladenine
  modified_base 44: mod_base = OTHER; note = 2'-O-methyladenine
  modified_base 49: mod_base = cm
  modified_base 50: mod_base = cm
  modified_base 52: mod_base = gm
  modified_base 54: mod_base = um
  modified_base 56: mod_base = cm
  modified_base 57: mod_base = OTHER; note = 2'-fluoro-guanine
  modified_base 59: mod_base = gm
  modified_base 61: mod_base = cm
  modified_base 65: mod_base = gm
  modified_base 73: mod_base = gm

SEQ ID NO: 1019 - RNA, 76 nt, synthetic construct; identical to SEQ ID NO: 799
  misc_feature 1..76: note = Description of sequence: tRNA-based effector molecule
  source 1..76: mol_type = other RNA
  modified_base 1: mod_base = gm
  modified_base 2: mod_base = cm
  modified_base 3: mod_base = cm
  modified_base 4: mod_base = um
  modified_base 5: mod_base = cm
  modified_base 6: mod_base = cm
  modified_base 10: mod_base = gm
  modified_base 11: mod_base = cm
  modified_base 12: mod_base = cm
  modified_base 13: mod_base = um
  modified_base 14: mod_base = OTHER; note = 2'-O-methyladenine
  modified_base 15: mod_base = OTHER; note = 2'-fluoro-adenine
  modified_base 16: mod_base = um
  modified_base 17: mod_base = gm
  modified_base 18: mod_base = gm
  modified_base 19: mod_base = OTHER; note = 2'-fluoro-adenine
  modified_base 20: mod_base = um
  modified_base 25: mod_base = cm
  modified_base 33: mod_base = OTHER; note = 2'-fluoro-uracil
  modified_base 41: mod_base = cm
  modified_base 42: mod_base = gm
  modified_base 43: mod_base = gm
  modified_base 44: mod_base = gm
  modified_base 49: mod_base = gm
  modified_base 50: mod_base = cm
  modified_base 52: mod_base = gm
  modified_base 54: mod_base = um
  modified_base 56: mod_base = cm
  modified_base 57: mod_base = OTHER; note = 2'-fluoro-guanine
  modified_base 59: mod_base = gm
  modified_base 61: mod_base = cm
  modified_base 65: mod_base = um
  modified_base 73: mod_base = gm

SEQ ID NO: 1020 - RNA, 76 nt, synthetic construct; identical to SEQ ID NO: 641
  misc_feature 1..76: note = Description of sequence: tRNA-based effector molecule
  source 1..76: mol_type = other RNA
  modified_base 1: mod_base = gm
  modified_base 2: mod_base = cm
  modified_base 3: mod_base = cm
  modified_base 4: mod_base = um
  modified_base 5: mod_base = cm
  modified_base 6: mod_base = cm
  modified_base 10: mod_base = gm
  modified_base 11: mod_base = cm
  modified_base 12: mod_base = gm
  modified_base 13: mod_base = cm
  modified_base 14: mod_base = OTHER; note = 2'-O-methyladenine
  modified_base 15: mod_base = OTHER; note = 2'-fluoro-adenine
  modified_base 16: mod_base = um
  modified_base 17: mod_base = gm
  modified_base 18: mod_base = gm
  modified_base 19: mod_base = OTHER; note = 2'-fluoro-adenine
  modified_base 20: mod_base = um
  modified_base 25: mod_base = cm
  modified_base 33: mod_base = OTHER; note = 2'-fluoro-uracil
  modified_base 41: mod_base = cm
  modified_base 42: mod_base = OTHER; note = 2'-O-methyladenine
  modified_base 43: mod_base = cm
  modified_base 44: mod_base = OTHER; note = 2'-O-methyladenine
  modified_base 49: mod_base = cm
  modified_base 50: mod_base = cm
  modified_base 52: mod_base = gm
  modified_base 54: mod_base = um
  modified_base 56: mod_base = cm
  modified_base 57: mod_base = OTHER; note = 2'-fluoro-guanine
  modified_base 59: mod_base = gm
  modified_base 61: mod_base = cm
  modified_base 65: mod_base = gm
  modified_base 73: mod_base = gm

SEQ ID NO: 1021 - RNA, 76 nt, synthetic construct; identical to SEQ ID NO: 652
  misc_feature 1..76: note = Description of sequence: tRNA-based effector molecule
  source 1..76: mol_type = other RNA
  modified_base 1: mod_base = gm
  modified_base 2: mod_base = gm
  modified_base 3: mod_base = cm
  modified_base 4: mod_base = cm
  modified_base 5: mod_base = cm
  modified_base 6: mod_base = cm
  modified_base 10: mod_base = gm
  modified_base 11: mod_base = cm
  modified_base 12: mod_base = gm
  modified_base 13: mod_base = cm
  modified_base 14: mod_base = OTHER; note = 2'-O-methyladenine
  modified_base 15: mod_base = OTHER; note = 2'-fluoro-adenine
  modified_base 16: mod_base = um
  modified_base 17: mod_base = gm
  modified_base 18: mod_base = gm
  modified_base 19: mod_base = OTHER; note = 2'-fluoro-adenine
  modified_base 20: mod_base = um
  modified_base 25: mod_base = cm
  modified_base 33: mod_base = OTHER; note = 2'-fluoro-uracil
  modified_base 41: mod_base = cm
  modified_base 42: mod_base = OTHER; note = 2'-O-methyladenine
  modified_base 43: mod_base = OTHER; note = 2'-O-methyladenine
  modified_base 44: mod_base = OTHER; note = 2'-O-methyladenine
  modified_base 49: mod_base = cm
  modified_base 50: mod_base = cm
  modified_base 52: mod_base = gm
  modified_base 54: mod_base = um
  modified_base 56: mod_base = cm
  modified_base 57: mod_base = OTHER; note = 2'-fluoro-guanine
  modified_base 59: mod_base = gm
  modified_base 61: mod_base = cm
  modified_base 65: mod_base = gm
  modified_base 73: mod_base = gm

SEQ ID NO: 1022 - RNA, 76 nt, synthetic construct; identical to SEQ ID NO: 802
  misc_feature 1..76: note = Description of sequence: tRNA-based effector molecule
  source 1..76: mol_type = other RNA
  modified_base 1: mod_base = gm
  modified_base 2: mod_base = gm
  modified_base 3: mod_base = cm
  modified_base 4: mod_base = cm
  modified_base 5: mod_base = cm
  modified_base 6: mod_base = cm
  modified_base 10: mod_base = gm
  modified_base 11: mod_base = cm
  modified_base 12: mod_base = gm
  modified_base 13: mod_base = cm
  modified_base 14: mod_base = OTHER; note = 2'-O-methyladenine
  modified_base 15: mod_base = OTHER; note = 2'-fluoro-adenine
  modified_base 16: mod_base = um
  modified_base 17: mod_base = gm
  modified_base 18: mod_base = gm
  modified_base 19: mod_base = OTHER; note = 2'-fluoro-adenine
  modified_base 20: mod_base = um
  modified_base 25: mod_base = cm
  modified_base 33: mod_base = OTHER; note = 2'-fluoro-uracil
  modified_base 41: mod_base = cm
  modified_base 42: mod_base = OTHER; note = 2'-O-methyladenine
  modified_base 43: mod_base = OTHER; note = 2'-O-methyladenine
  modified_base 44: mod_base = OTHER; note = 2'-O-methyladenine
  modified_base 49: mod_base = gm
  modified_base 50: mod_base = cm
  modified_base 52: mod_base = gm
  modified_base 54: mod_base = um
  modified_base 56: mod_base = cm
  modified_base 57: mod_base = OTHER; note = 2'-fluoro-guanine
  modified_base 59: mod_base = gm
  modified_base 61: mod_base = cm
  modified_base 65: mod_base = cm
  modified_base 73: mod_base = gm

SEQ ID NO: 1023 - RNA, 76 nt, synthetic construct; identical to SEQ ID NO: 702
  misc_feature 1..76: note = Description of sequence: tRNA-based effector molecule
  source 1..76: mol_type = other RNA
  modified_base 1: mod_base = gm
  modified_base 2: mod_base = gm
  modified_base 3: mod_base = cm
  modified_base 4: mod_base = um
  modified_base 5: mod_base = cm
  modified_base 6: mod_base = cm
  modified_base 10: mod_base = gm
  modified_base 11: mod_base = cm
  modified_base 12: mod_base = gm
  modified_base 13: mod_base = cm
  modified_base 14: mod_base = OTHER; note = 2'-O-methyladenine
  modified_base 15: mod_base = OTHER; note = 2'-fluoro-adenine
  modified_base 16: mod_base = um
  modified_base 17: mod_base = gm
  modified_base 18: mod_base = gm
  modified_base 19: mod_base = OTHER; note = 2'-fluoro-adenine
  modified_base 20: mod_base = um
  modified_base 25: mod_base = cm
  modified_base 33: mod_base = OTHER; note = 2'-fluoro-uracil
  modified_base 41: mod_base = gm
  modified_base 42: mod_base = gm
  modified_base 43: mod_base = um
  modified_base 44: mod_base = OTHER; note = 2'-O-methyladenine
  modified_base 49: mod_base = cm
  modified_base 50: mod_base = cm
  modified_base 52: mod_base = gm
  modified_base 54: mod_base = um
  modified_base 56: mod_base = cm
  modified_base 57: mod_base = OTHER; note = 2'-fluoro-guanine
  modified_base 59: mod_base = gm
  modified_base 61: mod_base = cm
  modified_base 65: mod_base = gm
  modified_base 73: mod_base = gm

SEQ ID NO: 1024 - RNA, 76 nt, synthetic construct; identical to SEQ ID NO: 710
  misc_feature 1..76: note = Description of sequence: tRNA-based effector molecule
  source 1..76: mol_type = other RNA
  modified_base 1: mod_base = gm
  modified_base 2: mod_base = gm
  modified_base 3: mod_base = cm
  modified_base 4: mod_base = um
  modified_base 5: mod_base = cm
  modified_base 6: mod_base = cm
  modified_base 10: mod_base = gm
  modified_base 11: mod_base = cm
  modified_base 12: mod_base = gm
  modified_base 13: mod_base = cm
  modified_base 14: mod_base = OTHER; note = 2'-O-methyladenine
  modified_base 15: mod_base = OTHER; note = 2'-fluoro-adenine
  modified_base 16: mod_base = um
  modified_base 17: mod_base = gm
  modified_base 18: mod_base = gm
  modified_base 19: mod_base = OTHER; note = 2'-fluoro-adenine
  modified_base 20: mod_base = um
  modified_base 25: mod_base = cm
  modified_base 33: mod_base = OTHER; note = 2'-fluoro-uracil
  modified_base 41: mod_base = cm
  modified_base 42: mod_base = gm
  modified_base 43: mod_base = OTHER; note = 2'-O-methyladenine
  modified_base 44: mod_base = OTHER; note = 2'-O-methyladenine
  modified_base 49: mod_base = cm
  modified_base 50: mod_base = cm
  modified_base 52: mod_base = gm
  modified_base 54: mod_base = um
  modified_base 56: mod_base = cm
  modified_base 57: mod_base = OTHER; note = 2'-fluoro-guanine
  modified_base 59: mod_base = gm
  modified_base 61: mod_base = cm
  modified_base 65: mod_base = gm
  modified_base 73: mod_base = gm

SEQ ID NO: 1025 - RNA, 76 nt, synthetic construct; identical to SEQ ID NO: 805
  misc_feature 1..76: note = Description of sequence: tRNA-based effector molecule
  source 1..76: mol_type = other RNA
  modified_base 1: mod_base = gm
  modified_base 2: mod_base = gm
  modified_base 3: mod_base = cm
  modified_base 4: mod_base = um
  modified_base 5: mod_base = cm
  modified_base 6: mod_base = cm
  modified_base 10: mod_base = gm
  modified_base 11: mod_base = cm
  modified_base 12: mod_base = gm
  modified_base 13: mod_base = cm
  modified_base 14: mod_base = OTHER; note = 2'-O-methyladenine
  modified_base 15: mod_base = OTHER; note = 2'-fluoro-adenine
  modified_base 16: mod_base = um
  modified_base 17: mod_base = gm
  modified_base 18: mod_base = gm
  modified_base 19: mod_base = OTHER; note = 2'-fluoro-adenine
  modified_base 20: mod_base = um
  modified_base 25: mod_base = cm
  modified_base 33: mod_base = OTHER; note = 2'-fluoro-uracil
  modified_base 41: mod_base = cm
  modified_base 42: mod_base = OTHER; note = 2'-O-methyladenine
  modified_base 43: mod_base = OTHER; note = 2'-O-methyladenine
  modified_base 44: mod_base = OTHER; note = 2'-O-methyladenine
  modified_base 49: mod_base = gm
  modified_base 50: mod_base = cm
  modified_base 52: mod_base = gm
  modified_base 54: mod_base = um
  modified_base 56: mod_base = cm
  modified_base 57: mod_base = OTHER; note = 2'-fluoro-guanine
  modified_base 59: mod_base = gm
  modified_base 61: mod_base = cm
  modified_base 65: mod_base = cm
  modified_base 73: mod_base = gm

SEQ ID NO: 1026 - RNA, 76 nt, synthetic construct; identical to SEQ ID NO: 743
  misc_feature 1..76: note = Description of sequence: tRNA-based effector molecule
  source 1..76: mol_type = other RNA
  modified_base 1: mod_base = gm
  modified_base 2: mod_base = gm
  modified_base 3: mod_base = cm
  modified_base 4: mod_base = um
  modified_base 5: mod_base = cm
  modified_base 6: mod_base = cm
  modified_base 10: mod_base = gm
  modified_base 11: mod_base = cm
  modified_base 12: mod_base = gm
  modified_base 13: mod_base = cm
  modified_base 14: mod_base = OTHER; note = 2'-O-methyladenine
  modified_base 15: mod_base = OTHER; note = 2'-fluoro-adenine
  modified_base 16: mod_base = um
  modified_base 17: mod_base = gm
  modified_base 18: mod_base = gm
  modified_base 19: mod_base = OTHER; note = 2'-fluoro-adenine
  modified_base 20: mod_base = um
  modified_base 25: mod_base = cm
  modified_base 33: mod_base = OTHER; note = 2'-fluoro-uracil
  modified_base 41: mod_base = cm
  modified_base 42: mod_base = OTHER; note = 2'-O-methyladenine
  modified_base 43: mod_base = OTHER; note = 2'-O-methyladenine
  modified_base 44: mod_base = gm
  modified_base 49: mod_base = cm
  modified_base 50: mod_base = cm
  modified_base 52: mod_base = gm
  modified_base 54: mod_base = um
  modified_base 56: mod_base = cm
  modified_base 57: mod_base = OTHER; note = 2'-fluoro-guanine
  modified_base 59: mod_base = gm
  modified_base 61: mod_base = cm
  modified_base 65: mod_base = gm
  modified_base 73: mod_base = gm

SEQ ID NO: 1027 - RNA, 76 nt, synthetic construct; identical to SEQ ID NO: 794
  misc_feature 1..76: note = Description of sequence: tRNA-based effector molecule
  source 1..76: mol_type = other RNA
  modified_base 1: mod_base = um
  modified_base 2: mod_base = OTHER; note = 2'-O-methyladenine
  modified_base 3: mod_base = cm
  modified_base 4: mod_base = OTHER; note = 2'-O-methyladenine
  modified_base 5: mod_base = cm
  modified_base 6: mod_base = cm
  modified_base 10: mod_base = gm
  modified_base 11: mod_base = cm
  modified_base 12: mod_base = gm
  modified_base 13: mod_base = cm
  modified_base 14: mod_base = OTHER; note = 2'-O-methyladenine
  modified_base 15: mod_base = OTHER; note = 2'-fluoro-adenine
  modified_base 16: mod_base = um
  modified_base 17: mod_base = gm
  modified_base 18: mod_base = gm
  modified_base 19: mod_base = OTHER; note = 2'-fluoro-adenine
  modified_base 20: mod_base = um
  modified_base 25: mod_base = cm
  modified_base 33: mod_base = OTHER; note = 2'-fluoro-uracil
  modified_base 41: mod_base = cm
  modified_base 42: mod_base = OTHER; note = 2'-O-methyladenine
  modified_base 43: mod_base = OTHER; note = 2'-O-methyladenine
  modified_base 44: mod_base = OTHER; note = 2'-O-methyladenine
  modified_base 49: mod_base = cm
  modified_base 50: mod_base = cm
  modified_base 52: mod_base = gm
  modified_base 54: mod_base = um
  modified_base 56: mod_base = cm
  modified_base 57: mod_base = OTHER; note = 2'-fluoro-guanine
  modified_base 59: mod_base = gm
  modified_base 61: mod_base = cm
  modified_base 65: mod_base = gm
  modified_base 73: mod_base = gm

SEQ ID NO: 1028 - RNA, 76 nt, synthetic construct; identical to SEQ ID NO: 627
  misc_feature 1..76: note = Description of sequence: tRNA-based effector molecule
  source 1..76: mol_type = other RNA
  modified_base 1: mod_base = OTHER; note = 2'-O-methyladenine
  modified_base 2: mod_base = cm
  modified_base 3: mod_base = cm
  modified_base 4: mod_base = OTHER; note = 2'-O-methyladenine
  modified_base 5: mod_base = OTHER; note = 2'-O-methyladenine
  modified_base 6: mod_base = cm
  modified_base 49: mod_base = cm
  modified_base 50: mod_base = cm
  modified_base 51: mod_base = gm
  modified_base 52: mod_base = gm
  modified_base 53: mod_base = gm
  modified_base 61: mod_base = cm
  modified_base 62: mod_base = cm
  modified_base 63: mod_base = OTHER; note = 2'-fluoro-cytosine
  modified_base 64: mod_base = gm
  modified_base 65: mod_base = gm
  modified_base 66: mod_base = cm
  modified_base 67: mod_base = gm
  modified_base 68: mod_base = um
  modified_base 69: mod_base = um
  modified_base 71: mod_base = gm
  modified_base 72: mod_base = um

SEQ ID NO: 1029 - RNA, 76 nt, synthetic construct; identical to SEQ ID NO: 639
  misc_feature 1..76: note = Description of sequence: tRNA-based effector molecule
  source 1..76: mol_type = other RNA
  modified_base 1: mod_base = gm
  modified_base 2: mod_base = cm
  modified_base 3: mod_base = cm
  modified_base 4: mod_base = cm
  modified_base 5: mod_base = gm
  modified_base 6: mod_base = OTHER; note = 2'-O-methyladenine
  modified_base 49: mod_base = cm
  modified_base 50: mod_base = cm
  modified_base 51: mod_base = gm
  modified_base 52: mod_base = gm
  modified_base 53: mod_base = gm
  modified_base 61: mod_base = cm
  modified_base 62: mod_base = cm
  modified_base 63: mod_base = OTHER; note = 2'-fluoro-cytosine
  modified_base 64: mod_base = gm
  modified_base 65: mod_base = gm
  modified_base 66: mod_base = cm
  modified_base 67: mod_base = um
  modified_base 68: mod_base = cm
  modified_base 69: mod_base = gm
  modified_base 71: mod_base = gm
  modified_base 72: mod_base = cm

SEQ ID NO: 1030 - RNA, 76 nt, synthetic construct; identical to SEQ ID NO: 799
  misc_feature 1..76: note = Description of sequence: tRNA-based effector molecule
  source 1..76: mol_type = other RNA
  modified_base 1: mod_base = gm
  modified_base 2: mod_base = cm
  modified_base 3: mod_base = cm
  modified_base 4: mod_base = um
  modified_base 5: mod_base = cm
  modified_base 6: mod_base = cm
  modified_base 49: mod_base = gm
  modified_base 50: mod_base = cm
  modified_base 51: mod_base = gm
  modified_base 52: mod_base = gm
  modified_base 53: mod_base = gm
  modified_base 61: mod_base = cm
  modified_base 62: mod_base = cm
  modified_base 63: mod_base = OTHER; note = 2'-fluoro-cytosine
  modified_base 64: mod_base = gm
  modified_base 65: mod_base = um
  modified_base 66: mod_base = cm
  modified_base 67: mod_base = gm
  modified_base 68: mod_base = gm
  modified_base 69: mod_base = OTHER; note = 2'-O-methyladenine
  modified_base 71: mod_base = gm
  modified_base 72: mod_base = um

SEQ ID NO: 1031 - RNA, 76 nt, synthetic construct; identical to SEQ ID NO: 641
  misc_feature 1..76: note = Description of sequence: tRNA-based effector molecule
  source 1..76: mol_type = other RNA
  modified_base 1: mod_base = gm
  modified_base 2: mod_base = cm
  modified_base 3: mod_base = cm
  modified_base 4: mod_base = um
  modified_base 5: mod_base = cm
  modified_base 6: mod_base = cm
  modified_base 49: mod_base = cm
  modified_base 50: mod_base = cm
  modified_base 51: mod_base = gm
  modified_base 52: mod_base = gm
  modified_base 53: mod_base = gm
  modified_base 61: mod_base = cm
  modified_base 62: mod_base = cm
  modified_base 63: mod_base = OTHER; note = 2'-fluoro-cytosine
  modified_base 64: mod_base = gm
  modified_base 65: mod_base = gm
  modified_base 66: mod_base = cm
  modified_base 67: mod_base = gm
  modified_base 68: mod_base = gm
  modified_base 69: mod_base = OTHER; note = 2'-O-methyladenine
  modified_base 71: mod_base = gm
  modified_base 72: mod_base = cm

SEQ ID NO: 1032 - RNA, 76 nt, synthetic construct; identical to SEQ ID NO: 652
  misc_feature 1..76: note = Description of sequence: tRNA-based effector molecule
  source 1..76: mol_type = other RNA
  modified_base 1: mod_base = gm
  modified_base 2: mod_base = gm
  modified_base 3: mod_base = cm
  modified_base 4: mod_base = cm
  modified_base 5: mod_base = cm
  modified_base 6: mod_base = cm
  modified_base 49: mod_base = cm
  modified_base 50: mod_base = cm
  modified_base 51: mod_base = gm
  modified_base 52: mod_base = gm
  modified_base 53: mod_base = gm
  modified_base 61: mod_base = cm
  modified_base 62: mod_base = cm
  modified_base 63: mod_base = OTHER; note = 2'-fluoro-cytosine
  modified_base 64: mod_base = gm
  modified_base 65: mod_base = gm
  modified_base 66: mod_base = um
  modified_base 67: mod_base = gm
  modified_base 68: mod_base = gm
  modified_base 69: mod_base = gm
  modified_base 71: mod_base = um
  modified_base 72: mod_base = cm

SEQ ID NO: 1033 - RNA, 76 nt, synthetic construct; identical to SEQ ID NO: 802
  misc_feature 1..76: note = Description of sequence: tRNA-based effector molecule
  source 1..76: mol_type = other RNA
  modified_base 1: mod_base = gm
  modified_base 2: mod_base = gm
  modified_base 3: mod_base = cm
  modified_base 4: mod_base = cm
  modified_base 5: mod_base = cm
  modified_base 6: mod_base = cm
  modified_base 49: mod_base = gm
  modified_base 50: mod_base = cm
  modified_base 51: mod_base = gm
  modified_base 52: mod_base = gm
  modified_base 53: mod_base = gm
  modified_base 61: mod_base = cm
  modified_base 62: mod_base = cm
  modified_base 63: mod_base = OTHER; note = 2'-fluoro-cytosine
  modified_base 64: mod_base = gm
  modified_base 65: mod_base = cm
  modified_base 66: mod_base = cm
  modified_base 67: mod_base = gm
  modified_base 68: mod_base = gm
  modified_base 69: mod_base = gm
  modified_base 71: mod_base = um
  modified_base 72: mod_base = cm

SEQ ID NO: 1034 - RNA, 76 nt, synthetic construct; identical to SEQ ID NO: 702
  misc_feature 1..76: note = Description of sequence: tRNA-based effector molecule
  source 1..76: mol_type = other RNA
  modified_base 1: mod_base = gm
  modified_base 2: mod_base = gm
  modified_base 3: mod_base = cm
  modified_base 4: mod_base = um
  modified_base 5: mod_base = cm
  modified_base 6: mod_base = cm
  modified_base 49: mod_base = cm
  modified_base 50: mod_base = cm
  modified_base 51: mod_base = gm
  modified_base 52: mod_base = gm
  modified_base 53: mod_base = gm
  modified_base 61: mod_base = cm
  modified_base 62: mod_base = cm
  modified_base 63: mod_base = OTHER; note = 2'-fluoro-cytosine
  modified_base 64: mod_base = gm
  modified_base 65: mod_base = gm
  modified_base 66: mod_base = cm
  modified_base 67: mod_base = gm
  modified_base 68: mod_base = gm
  modified_base 69: mod_base = OTHER; note = 2'-O-methyladenine
  modified_base 71: mod_base = um
  modified_base 72: mod_base = cm

SEQ ID NO: 1035 - RNA, 76 nt, synthetic construct; identical to SEQ ID NO: 710
  misc_feature 1..76: note = Description of sequence: tRNA-based effector molecule
  source 1..76: mol_type = other RNA
  modified_base 1: mod_base = gm
  modified_base 2: mod_base = gm
  modified_base 3: mod_base = cm
  modified_base 4: mod_base = um
  modified_base 5: mod_base = cm
  modified_base 6: mod_base = cm
  modified_base 49: mod_base = cm
  modified_base 50: mod_base = cm
  modified_base 51: mod_base = gm
  modified_base 52: mod_base = gm
  modified_base 53: mod_base = gm
  modified_base 61: mod_base = cm
  modified_base 62: mod_base = cm
  modified_base 63: mod_base = OTHER; note = 2'-fluoro-cytosine
  modified_base 64: mod_base = gm
  modified_base 65: mod_base = gm
  modified_base 66: mod_base = cm
  modified_base 67: mod_base = gm
  modified_base 68: mod_base = gm
  modified_base 69: mod_base = OTHER; note = 2'-O-methyladenine
  modified_base 71: mod_base = um
  modified_base 72: mod_base = cm

SEQ ID NO: 1036 - RNA, 76 nt, synthetic construct; identical to SEQ ID NO: 805
  misc_feature 1..76: note = Description of sequence: tRNA-based effector molecule
  source 1..76: mol_type = other RNA
  modified_base 1: mod_base = gm
  modified_base 2: mod_base = gm
  modified_base 3: mod_base = cm
  modified_base 4: mod_base = um
  modified_base 5: mod_base = cm
  modified_base 6: mod_base = cm
  modified_base 49: mod_base = gm
  modified_base 50: mod_base = cm
  modified_base 51: mod_base = gm
  modified_base 52: mod_base = gm
  modified_base 53: mod_base = gm
  modified_base 61: mod_base = cm
  modified_base 62: mod_base = cm
  modified_base 63: mod_base = OTHER; note = 2'-fluoro-cytosine
  modified_base 64: mod_base = gm
  modified_base 65: mod_base = cm
  modified_base 66: mod_base = cm
  modified_base 67: mod_base = gm
  modified_base 68: mod_base = gm
  modified_base 69: mod_base = OTHER; note = 2'-O-methyladenine
  modified_base 71: mod_base = um
  modified_base 72: mod_base = cm

SEQ ID NO: 1037 - RNA, 76 nt, synthetic construct; identical to SEQ ID NO: 743
  misc_feature 1..76: note = Description of sequence: tRNA-based effector molecule
  source 1..76: mol_type = other RNA
  modified_base 1: mod_base = gm
  modified_base 2: mod_base = gm
  modified_base 3: mod_base = cm
  modified_base 4: mod_base = um
  modified_base 5: mod_base = cm
  modified_base 6: mod_base = cm
  modified_base 49: mod_base = cm
  modified_base 50: mod_base = cm
  modified_base 51: mod_base = gm
  modified_base 52: mod_base = gm
  modified_base 53: mod_base = gm
  modified_base 61: mod_base = cm
  modified_base 62: mod_base = cm
  modified_base 63: mod_base = OTHER; note = 2'-fluoro-cytosine
  modified_base 64: mod_base = gm
  modified_base 65: mod_base = gm
  modified_base 66: mod_base = cm
  modified_base 67: mod_base = gm
  modified_base 68: mod_base = gm
  modified_base 69: mod_base = OTHER; note = 2'-O-methyladenine
  modified_base 71: mod_base = um
  modified_base 72: mod_base = cm

SEQ ID NO: 1038 - RNA, 76 nt, synthetic construct; identical to SEQ ID NO: 794
  misc_feature 1..76: note = Description of sequence: tRNA-based effector molecule
  source 1..76: mol_type = other RNA
  modified_base 1: mod_base = um
  modified_base 2: mod_base = OTHER; note = 2'-O-methyladenine
  modified_base 3: mod_base = cm
  modified_base 4: mod_base = OTHER; note = 2'-O-methyladenine
  modified_base 5: mod_base = cm
  modified_base 6: mod_base = cm
  modified_base 49: mod_base = cm
  modified_base 50: mod_base = cm
  modified_base 51: mod_base = gm
  modified_base 52: mod_base = gm
  modified_base 53: mod_base = gm
  modified_base 61: mod_base = cm
  modified_base 62: mod_base = cm
  modified_base 63: mod_base = OTHER; note = 2'-fluoro-cytosine
  modified_base 64: mod_base = gm
  modified_base 65: mod_base = gm
  modified_base 66: mod_base = cm
  modified_base 67: mod_base = gm
  modified_base 68: mod_base = gm
  modified_base 69: mod_base = um
  modified_base 71: mod_base = um
  modified_base 72: mod_base = OTHER; note = 2'-O-methyladenine

SEQ ID NO: 1039 - RNA, 76 nt, synthetic construct; identical to SEQ ID NO: 627
  misc_feature 1..76: note = Description of sequence: tRNA-based effector molecule
  source 1..76: mol_type = other RNA
  modified_base 1: mod_base = OTHER; note = 2'-O-methyladenine
  modified_base 2: mod_base = cm
  modified_base 3: mod_base = cm
  modified_base 4: mod_base = OTHER; note = 2'-O-methyladenine
  modified_base 5: mod_base = OTHER; note = 2'-O-methyladenine
  modified_base 6: mod_base = cm
  modified_base 44: mod_base = OTHER; note = 2'-O-methyladenine
  modified_base 45: mod_base = gm
  modified_base 46: mod_base = OTHER; note = 2'-fluoro-guanine
  modified_base 47: mod_base = OTHER; note = 2'-fluoro-uracil
  modified_base 48: mod_base = um
  modified_base 49: mod_base = cm
  modified_base 73: mod_base = gm

SEQ ID NO: 1040 - RNA, 76 nt, synthetic construct; identical to SEQ ID NO: 639
  misc_feature 1..76: note = Description of sequence: tRNA-based effector molecule
  source 1..76: mol_type = other RNA
  modified_base 1: mod_base = gm
  modified_base 2: mod_base = cm
  modified_base 3: mod_base = cm
  modified_base 4: mod_base = cm
  modified_base 5: mod_base = gm
  modified_base 6: mod_base = OTHER; note = 2'-O-methyladenine
  modified_base 44: mod_base = OTHER; note = 2'-O-methyladenine
  modified_base 45: mod_base = gm
  modified_base 46: mod_base = OTHER; note = 2'-fluoro-guanine
  modified_base 47: mod_base = OTHER; note = 2'-fluoro-uracil
  modified_base 48: mod_base = um
  modified_base 49: mod_base = cm
  modified_base 73: mod_base = gm

SEQ ID NO: 1041 - RNA, 76 nt, synthetic construct; identical to SEQ ID NO: 799
  misc_feature 1..76: note = Description of sequence: tRNA-based effector molecule
  source 1..76: mol_type = other RNA
  modified_base 1: mod_base = gm
  modified_base 2: mod_base = cm
  modified_base 3: mod_base = cm
  modified_base 4: mod_base = um
  modified_base 5: mod_base = cm
  modified_base 6: mod_base = cm
  modified_base 44: mod_base = gm
  modified_base 45: mod_base = gm
  modified_base 46: mod_base = OTHER; note = 2'-fluoro-adenine
  modified_base 47: mod_base = OTHER; note = 2'-fluoro-uracil
  modified_base 48: mod_base = um
  modified_base 49: mod_base = gm
  modified_base 73: mod_base = gm

SEQ ID NO: 1042 - RNA, 76 nt, synthetic construct; identical to SEQ ID NO: 641
  misc_feature 1..76: note = Description of sequence: tRNA-based effector molecule
  source 1..76: mol_type = other RNA
  modified_base 1: mod_base = gm
  modified_base 2: mod_base = cm
  modified_base 3: mod_base = cm
  modified_base 4: mod_base = um
  modified_base 5: mod_base = cm
  modified_base 6: mod_base = cm
  modified_base 44: mod_base = OTHER; note = 2'-O-methyladenine
  modified_base 45: mod_base = gm
  modified_base 46: mod_base = OTHER; note = 2'-fluoro-guanine
  modified_base 47: mod_base = OTHER; note = 2'-fluoro-uracil
  modified_base 48: mod_base = um
  modified_base 49: mod_base = cm
  modified_base 73: mod_base = gm

SEQ ID NO: 1043 - RNA, 76 nt, synthetic construct; identical to SEQ ID NO: 652
  misc_feature 1..76: note = Description of sequence: tRNA-based effector molecule
  source 1..76: mol_type = other RNA
  modified_base 1: mod_base = gm
  modified_base 2: mod_base = gm
  modified_base 3: mod_base = cm
  modified_base 4: mod_base = cm
  modified_base 5: mod_base = cm
  modified_base 6: mod_base = cm
  modified_base 44: mod_base = OTHER; note = 2'-O-methyladenine
  modified_base 45: mod_base = gm
  modified_base 46: mod_base = OTHER; note = 2'-fluoro-guanine
  modified_base 47: mod_base = OTHER; note = 2'-fluoro-uracil
  modified_base 48: mod_base = um
  modified_base 49: mod_base = cm
  modified_base 73: mod_base = gm

SEQ ID NO: 1044 - RNA, 76 nt, synthetic construct; identical to SEQ ID NO: 802
  misc_feature 1..76: note = Description of sequence: tRNA-based effector molecule
  source 1..76: mol_type = other RNA
  modified_base 1: mod_base = gm
  modified_base 2: mod_base = gm
  modified_base 3: mod_base = cm
  modified_base 4: mod_base = cm
  modified_base 5: mod_base = cm
  modified_base 6: mod_base = cm
  modified_base 44: mod_base = OTHER; note = 2'-O-methyladenine
  modified_base 45: mod_base = gm
  modified_base 46: mod_base = OTHER; note = 2'-fluoro-guanine
  modified_base 47: mod_base = OTHER; note = 2'-fluoro-uracil
  modified_base 48: mod_base = um
  modified_base 49: mod_base = gm
  modified_base 73: mod_base = gm

SEQ ID NO: 1045 - RNA, 76 nt, synthetic construct; identical to SEQ ID NO: 702
  misc_feature 1..76: note = Description of sequence: tRNA-based effector molecule
  source 1..76: mol_type = other RNA
  modified_base 1: mod_base = gm
  modified_base 2: mod_base = gm
  modified_base 3: mod_base = cm
  modified_base 4: mod_base = um
  modified_base 5: mod_base = cm
  modified_base 6: mod_base = cm
  modified_base 44: mod_base = OTHER; note = 2'-O-methyladenine
  modified_base 45: mod_base = gm
  modified_base 46: mod_base = OTHER; note = 2'-fluoro-guanine
  modified_base 47: mod_base = OTHER; note = 2'-fluoro-uracil
  modified_base 48: mod_base = um
  modified_base 49: mod_base = cm
  modified_base 73: mod_base = gm

SEQ ID NO: 1046 - RNA, 76 nt, synthetic construct; identical to SEQ ID NO: 710
  misc_feature 1..76: note = Description of sequence: tRNA-based effector molecule
  source 1..76: mol_type = other RNA
  modified_base 1: mod_base = gm
  modified_base 2: mod_base = gm
  modified_base 3: mod_base = cm
  modified_base 4: mod_base = um
  modified_base 5: mod_base = cm
  modified_base 6: mod_base = cm
  modified_base 44: mod_base = OTHER; note = 2'-O-methyladenine
  modified_base 45: mod_base = gm
  modified_base 46: mod_base = OTHER; note = 2'-fluoro-guanine
  modified_base 47: mod_base = OTHER; note = 2'-fluoro-uracil
  modified_base 48: mod_base = um
  modified_base 49: mod_base = cm
  modified_base 73: mod_base = gm

SEQ ID NO: 1047 - RNA, 76 nt, synthetic construct; identical to SEQ ID NO: 805
  misc_feature 1..76: note = Description of sequence: tRNA-based effector molecule
  source 1..76: mol_type = other RNA
  modified_base 1: mod_base = gm
  modified_base 2: mod_base = gm
  modified_base 3: mod_base = cm
  modified_base 4: mod_base = um
  modified_base 5: mod_base = cm
  modified_base 6: mod_base = cm
  modified_base 44: mod_base = OTHER; note = 2'-O-methyladenine
  modified_base 45: mod_base = gm
  modified_base 46: mod_base = OTHER; note = 2'-fluoro-guanine
  modified_base 47: mod_base = OTHER; note = 2'-fluoro-uracil
  modified_base 48: mod_base = um
  modified_base 49: mod_base = gm
  modified_base 73: mod_base = gm

SEQ ID NO: 1048 - RNA, 76 nt, synthetic construct; identical to SEQ ID NO: 743
  misc_feature 1..76: note = Description of sequence: tRNA-based effector molecule
  source 1..76: mol_type = other RNA
  modified_base 1: mod_base = gm
  modified_base 2: mod_base = gm
  modified_base 3: mod_base = cm
  modified_base 4: mod_base = um
  modified_base 5: mod_base = cm
  modified_base 6: mod_base = cm
  modified_base 44: mod_base = gm
  modified_base 45: mod_base = gm
  modified_base 46: mod_base = OTHER; note = 2'-fluoro-guanine
  modified_base 47: mod_base = OTHER; note = 2'-fluoro-uracil
  modified_base 48: mod_base = um
  modified_base 49: mod_base = cm
  modified_base 73: mod_base = gm

SEQ ID NO: 1049 - RNA, 76 nt, synthetic construct; identical to SEQ ID NO: 794
  misc_feature 1..76: note = Description of sequence: tRNA-based effector molecule
  source 1..76: mol_type = other RNA
  modified_base 1: mod_base = um
  modified_base 2: mod_base = OTHER; note = 2'-O-methyladenine
  modified_base 3: mod_base = cm
  modified_base 4: mod_base = OTHER; note = 2'-O-methyladenine
  modified_base 5: mod_base = cm
  modified_base 6: mod_base = cm
  modified_base 44: mod_base = OTHER; note = 2'-O-methyladenine
  modified_base 45: mod_base = gm
  modified_base 46: mod_base = OTHER; note = 2'-fluoro-guanine
  modified_base 47: mod_base = OTHER; note = 2'-fluoro-uracil
  modified_base 48: mod_base = um
  modified_base 49: mod_base = cm
  modified_base 73: mod_base = gm

SEQ ID NO: 1050 - RNA, 76 nt, synthetic construct; identical to SEQ ID NO: 627
  misc_feature 1..76: note = Description of sequence: tRNA-based effector molecule
  source 1..76: mol_type = other RNA
  modified_base 1: mod_base = OTHER; note = 2'-O-methyladenine
  modified_base 2: mod_base = cm
  modified_base 3: mod_base = cm
  modified_base 4: mod_base = OTHER; note = 2'-O-methyladenine
  modified_base 5: mod_base = OTHER; note = 2'-O-methyladenine
  modified_base 6: mod_base = cm
  modified_base 27: mod_base = um
  modified_base 28: mod_base = um
  modified_base 29: mod_base = OTHER; note = 2'-fluoro-guanine
  modified_base 30: mod_base = gm
  modified_base 40: mod_base = OTHER; note = 2'-fluoro-uracil
  modified_base 41: mod_base = cm
  modified_base 42: mod_base = OTHER; note = 2'-O-methyladenine
  modified_base 43: mod_base = OTHER; note = 2'-O-methyladenine
  modified_base 73: mod_base = gm

SEQ ID NO: 1051 - RNA, 76 nt, synthetic construct; identical to SEQ ID NO: 639
  misc_feature 1..76: note = Description of sequence: tRNA-based effector molecule
  source 1..76: mol_type = other RNA
  modified_base 1: mod_base = gm
  modified_base 2: mod_base = cm
  modified_base 3: mod_base = cm
  modified_base 4: mod_base = cm
  modified_base 5: mod_base = gm
  modified_base 6: mod_base = OTHER; note = 2'-O-methyladenine
  modified_base 27: mod_base = um
  modified_base 28: mod_base = um
  modified_base 29: mod_base = OTHER; note = 2'-fluoro-guanine
  modified_base 30: mod_base = gm
  modified_base 40: mod_base = OTHER; note = 2'-fluoro-uracil
  modified_base 41: mod_base = cm
  modified_base 42: mod_base = OTHER; note = 2'-O-methyladenine
  modified_base 43: mod_base = OTHER; note = 2'-O-methyladenine
  modified_base 73: mod_base = gm

SEQ ID NO: 1052 - RNA, 76 nt, synthetic construct; identical to SEQ ID NO: 799
  misc_feature 1..76: note = Description of sequence: tRNA-based effector molecule
  source 1..76: mol_type = other RNA
  modified_base 1: mod_base = gm
  modified_base 2: mod_base = cm
  modified_base 3: mod_base = cm
  modified_base 4: mod_base = um
  modified_base 5: mod_base = cm
  modified_base 6: mod_base = cm
  modified_base 27: mod_base = um
  modified_base 28: mod_base = cm
  modified_base 29: mod_base = OTHER; note = 2'-fluoro-guanine
  modified_base 30: mod_base = gm
  modified_base 40: mod_base = OTHER; note = 2'-fluoro-cytosine
  modified_base 41: mod_base = cm
  modified_base 42: mod_base = gm
  modified_base 43: mod_base = gm
  modified_base 73: mod_base = gm

SEQ ID NO: 1053 - RNA, 76 nt, synthetic construct; identical to SEQ ID NO: 641
  misc_feature 1..76: note = Description of sequence: tRNA-based effector molecule
  source 1..76: mol_type = other RNA
  modified_base 1: mod_base = gm
  modified_base 2: mod_base = cm
  modified_base 3: mod_base = cm
  modified_base 4: mod_base = um
  modified_base 5: mod_base = cm
  modified_base 6: mod_base = cm
  modified_base 27: mod_base = gm
  modified_base 28: mod_base = um
  modified_base 29: mod_base = OTHER; note = 2'-fluoro-guanine
  modified_base 30: mod_base = gm
  modified_base 40: mod_base = OTHER; note = 2'-fluoro-uracil
  modified_base 41: mod_base = cm
  modified_base 42: mod_base = OTHER; note = 2'-O-methyladenine
  modified_base 43: mod_base = cm
  modified_base 73: mod_base = gm

SEQ ID NO: 1054 - RNA, 76 nt, synthetic construct; identical to SEQ ID NO: 652
  misc_feature 1..76: note = Description of sequence: tRNA-based effector molecule
  source 1..76: mol_type = other RNA
  modified_base 1: mod_base = gm
  modified_base 2: mod_base = gm
  modified_base 3: mod_base = cm
  modified_base 4: mod_base = cm
  modified_base 5: mod_base = cm
  modified_base 6: mod_base = cm
  modified_base 27: mod_base = um
  modified_base 28: mod_base = um
  modified_base 29: mod_base = OTHER; note = 2'-fluoro-guanine
  modified_base 30: mod_base = gm
  modified_base 40: mod_base = OTHER; note = 2'-fluoro-uracil
  modified_base 41: mod_base = cm
  modified_base 42: mod_base = OTHER; note = 2'-O-methyladenine
  modified_base 43: mod_base = OTHER; note = 2'-O-methyladenine
  modified_base 73: mod_base = gm

SEQ ID NO: 1055 - RNA, 76 nt, synthetic construct; identical to SEQ ID NO: 802
  misc_feature 1..76: note = Description of sequence: tRNA-based effector molecule
  source 1..76: mol_type = other RNA
  modified_base 1: mod_base = gm
  modified_base 2: mod_base = gm
  modified_base 3: mod_base = cm
  modified_base 4: mod_base = cm
  modified_base 5: mod_base = cm
  modified_base 6: mod_base = cm
  modified_base 27: mod_base = um
  modified_base 28: mod_base = um
  modified_base 29: mod_base = OTHER; note = 2'-fluoro-guanine
  modified_base 30: mod_base = gm
  modified_base 40: mod_base = OTHER; note = 2'-fluoro-uracil
  modified_base 41: mod_base = cm
  modified_base 42: mod_base = OTHER; note = 2'-O-methyladenine
  modified_base 43: mod_base = OTHER; note = 2'-O-methyladenine
  modified_base 73: mod_base = gm

SEQ ID NO: 1056 - RNA, 76 nt, synthetic construct; identical to SEQ ID NO: 702
  misc_feature 1..76: note = Description of sequence: tRNA-based effector molecule
  source 1..76: mol_type = other RNA
  modified_base 1: mod_base = gm
  modified_base 2: mod_base = gm
  modified_base 3: mod_base = cm
  modified_base 4: mod_base = um
  modified_base 5: mod_base = cm
  modified_base 6: mod_base = cm
  modified_base 27: mod_base = OTHER; note = 2'-O-methyladenine
  modified_base 28: mod_base = cm
  modified_base 29: mod_base = OTHER; note = 2'-fluoro-cytosine
  modified_base 30: mod_base = gm
  modified_base 40: mod_base = OTHER; note = 2'-fluoro-cytosine
  modified_base 41: mod_base = gm
  modified_base 42: mod_base = gm
  modified_base 43: mod_base = um
  modified_base 73: mod_base = gm

SEQ ID NO: 1057 - RNA, 76 nt, synthetic construct; identical to SEQ ID NO: 710
  misc_feature 1..76: note = Description of sequence: tRNA-based effector molecule
  source 1..76: mol_type = other RNA
  modified_base 1: mod_base = gm
  modified_base 2: mod_base = gm
  modified_base 3: mod_base = cm
  modified_base 4: mod_base = um
  modified_base 5: mod_base = cm
  modified_base 6: mod_base = cm
  modified_base 27: mod_base = um
  modified_base 28: mod_base = cm
  modified_base 29: mod_base = OTHER; note = 2'-fluoro-guanine
  modified_base 30: mod_base = gm
  modified_base 40: mod_base = OTHER; note = 2'-fluoro-uracil
  modified_base 41: mod_base = cm
  modified_base 42: mod_base = gm
  modified_base 43: mod_base = OTHER; note = 2'-O-methyladenine
  modified_base 73: mod_base = gm

SEQ ID NO: 1058 - RNA, 76 nt, synthetic construct; identical to SEQ ID NO: 805
  misc_feature 1..76: note = Description of sequence: tRNA-based effector molecule
  source 1..76: mol_type = other RNA
  modified_base 1: mod_base = gm
  modified_base 2: mod_base = gm
  modified_base 3: mod_base = cm
  modified_base 4: mod_base = um
  modified_base 5: mod_base = cm
  modified_base 6: mod_base = cm
  modified_base 27: mod_base = um
  modified_base 28: mod_base = um
  modified_base 29: mod_base = OTHER; note = 2'-fluoro-guanine
  modified_base 30: mod_base = gm
  modified_base 40: mod_base = OTHER; note = 2'-fluoro-uracil
  modified_base 41: mod_base = cm
  modified_base 42: mod_base = OTHER; note = 2'-O-methyladenine
  modified_base 43: mod_base = OTHER; note = 2'-O-methyladenine
  modified_base 73: mod_base = gm

SEQ ID NO: 1059 - RNA, 76 nt, synthetic construct; identical to SEQ ID NO: 743
  misc_feature 1..76: note = Description of sequence: tRNA-based effector molecule
  source 1..76: mol_type = other RNA
  modified_base 1: mod_base = gm
  modified_base 2: mod_base = gm
  modified_base 3: mod_base = cm
  modified_base 4: mod_base = um
  modified_base 5: mod_base = cm
  modified_base 6: mod_base = cm
  modified_base 27: mod_base = um
  modified_base 28: mod_base = um
  modified_base 29: mod_base = OTHER; note = 2'-fluoro-guanine
  modified_base 30: mod_base = gm
  modified_base 40: mod_base = OTHER; note = 2'-fluoro-uracil
  modified_base 41: mod_base = cm
  modified_base 42: mod_base = OTHER; note = 2'-O-methyladenine
  modified_base 43: mod_base = OTHER; note = 2'-O-methyladenine
  modified_base 73: mod_base = gm

SEQ ID NO: 1060 - RNA, 76 nt, synthetic construct; identical to SEQ ID NO: 794
  misc_feature 1..76: note = Description of sequence: tRNA-based effector molecule
  source 1..76: mol_type = other RNA
  modified_base 1: mod_base = um
  modified_base 2: mod_base = OTHER; note = 2'-O-methyladenine
  modified_base 3: mod_base = cm
  modified_base 4: mod_base = OTHER; note = 2'-O-methyladenine
  modified_base 5: mod_base = cm
  modified_base 6: mod_base = cm
  modified_base 27: mod_base = um
  modified_base 28: mod_base = um
  modified_base 29: mod_base = OTHER; note = 2'-fluoro-guanine
  modified_base 30: mod_base = gm
  modified_base 40: mod_base = OTHER; note = 2'-fluoro-uracil
  modified_base 41: mod_base = cm
  modified_base 42: mod_base = OTHER; note = 2'-O-methyladenine
  modified_base 43: mod_base = OTHER; note = 2'-O-methyladenine
  modified_base 73: mod_base = gm

SEQ ID NO: 1061 - RNA, 76 nt, synthetic construct; identical to SEQ ID NO: 627
  misc_feature 1..76: note = Description of sequence: tRNA-based effector molecule
  source 1..76: mol_type = other RNA
  modified_base 1: mod_base = OTHER; note = 2'-O-methyladenine
  modified_base 2: mod_base = cm
  modified_base 75: mod_base = cm

SEQ ID NO: 1062 - RNA, 76 nt, synthetic construct; identical to SEQ ID NO: 639
  misc_feature 1..76: note = Description of sequence: tRNA-based effector molecule
  source 1..76: mol_type = other RNA
  modified_base 1: mod_base = gm
  modified_base 2: mod_base = cm
  modified_base 75: mod_base = cm

SEQ ID NO: 1063 - RNA, 76 nt, synthetic construct; identical to SEQ ID NO: 799
  misc_feature 1..76: note = Description of sequence: tRNA-based effector molecule
  source 1..76: mol_type = other RNA
  modified_base 1: mod_base = gm
  modified_base 2: mod_base = cm
  modified_base 75: mod_base = cm

SEQ ID NO: 1064 - RNA, 76 nt, synthetic construct; identical to SEQ ID NO: 641
  misc_feature 1..76: note = Description of sequence: tRNA-based effector molecule
  source 1..76: mol_type = other RNA
  modified_base 1: mod_base = gm
  modified_base 2: mod_base = cm
  modified_base 75: mod_base = cm

SEQ ID NO: 1065 - RNA, 76 nt, synthetic construct; identical to SEQ ID NO: 652
  misc_feature 1..76: note = Description of sequence: tRNA-based effector molecule
  source 1..76: mol_type = other RNA
  modified_base 1: mod_base = gm
  modified_base 2: mod_base = gm
  modified_base 75: mod_base = cm

SEQ ID NO: 1066 - RNA, 76 nt, synthetic construct; identical to SEQ ID NO: 802
  misc_feature 1..76: note = Description of sequence: tRNA-based effector molecule
  source 1..76: mol_type = other RNA
  modified_base 1: mod_base = gm
  modified_base 2: mod_base = gm
  modified_base 75: mod_base = cm

SEQ ID NO: 1067 - RNA, 76 nt, synthetic construct; identical to SEQ ID NO: 702
  misc_feature 1..76: note = Description of sequence: tRNA-based effector molecule
  source 1..76: mol_type = other RNA
  modified_base 1: mod_base = gm
  modified_base 2: mod_base = gm
  modified_base 75: mod_base = cm

SEQ ID NO: 1068 - RNA, 76 nt, synthetic construct; identical to SEQ ID NO: 710
  misc_feature 1..76: note = Description of sequence: tRNA-based effector molecule
  source 1..76: mol_type = other RNA
  modified_base 1: mod_base = gm
  modified_base 2: mod_base = gm
  modified_base 75: mod_base = cm

SEQ ID NO: 1069 - RNA, 76 nt, synthetic construct; identical to SEQ ID NO: 805
  misc_feature 1..76: note = Description of sequence: tRNA-based effector molecule
  source 1..76: mol_type = other RNA
  modified_base 1: mod_base = gm
  modified_base 2: mod_base = gm
  modified_base 75: mod_base = cm

SEQ ID NO: 1070 - RNA, 76 nt, synthetic construct; identical to SEQ ID NO: 743
  misc_feature 1..76: note = Description of sequence: tRNA-based effector molecule
  source 1..76: mol_type = other RNA
  modified_base 1: mod_base = gm
  modified_base 2: mod_base = gm
  modified_base 75: mod_base = cm

SEQ ID NO: 1071 - RNA, 76 nt, synthetic construct; identical to SEQ ID NO: 794
  misc_feature 1..76: note = Description of sequence: tRNA-based effector molecule
  source 1..76: mol_type = other RNA
  modified_base 1: mod_base = um
  modified_base 2: mod_base = OTHER; note = 2'-O-methyladenine
  modified_base 75: mod_base = cm

SEQ ID NO: 1072 - RNA, 76 nt, synthetic construct; identical to SEQ ID NO: 627
  misc_feature 1..76: note = Description of sequence: tRNA-based effector molecule
  source 1..76: mol_type = other RNA
  modified_base 1: mod_base = OTHER; note = 2'-O-methyladenine
  modified_base 2: mod_base = cm
  modified_base 75: mod_base = cm

SEQ ID NO: 1073 - RNA, 76 nt, synthetic construct; identical to SEQ ID NO: 639
  misc_feature 1..76: note = Description of sequence: tRNA-based effector molecule
  source 1..76: mol_type = other RNA
  modified_base 1: mod_base = gm
  modified_base 2: mod_base = cm
  modified_base 75: mod_base = cm

SEQ ID NO: 1074 - RNA, 76 nt, synthetic construct; identical to SEQ ID NO: 799
  misc_feature 1..76: note = Description of sequence: tRNA-based effector molecule
  source 1..76: mol_type = other RNA
  modified_base 1: mod_base = gm
  modified_base 2: mod_base = cm
  modified_base 75: mod_base = cm

SEQ ID NO: 1075 - RNA, 76 nt, synthetic construct; identical to SEQ ID NO: 641
  misc_feature 1..76: note = Description of sequence: tRNA-based effector molecule
  source 1..76: mol_type = other RNA
  modified_base 1: mod_base = gm
  modified_base 2: mod_base = cm
  modified_base 75: mod_base = cm

SEQ ID NO: 1076 - RNA, 76 nt, synthetic construct; identical to SEQ ID NO: 652
  misc_feature 1..76: note = Description of sequence: tRNA-based effector molecule
  source 1..76: mol_type = other RNA
  modified_base 1: mod_base = gm
  modified_base 2: mod_base = gm
  modified_base 75: mod_base = cm

SEQ ID NO: 1077 - RNA, 76 nt, synthetic construct; identical to SEQ ID NO: 802
  misc_feature 1..76: note = Description of sequence: tRNA-based effector molecule
  source 1..76: mol_type = other RNA
  modified_base 1: mod_base = gm
  modified_base 2: mod_base = gm
  modified_base 75: mod_base = cm

SEQ ID NO: 1078 - RNA, 76 nt, synthetic construct; identical to SEQ ID NO: 702
  misc_feature 1..76: note = Description of sequence: tRNA-based effector molecule
  source 1..76: mol_type = other RNA
  modified_base 1: mod_base = gm
  modified_base 2: mod_base = gm
  modified_base 75: mod_base = cm

SEQ ID NO: 1079 - RNA, 76 nt, synthetic construct; identical to SEQ ID NO: 710
  misc_feature 1..76: note = Description of sequence: tRNA-based effector molecule
  source 1..76: mol_type = other RNA
  modified_base 1: mod_base = gm
  modified_base 2: mod_base = gm
  modified_base 75: mod_base = cm

SEQ ID NO: 1080 - RNA, 76 nt, synthetic construct; identical to SEQ ID NO: 805
  misc_feature 1..76: note = Description of sequence: tRNA-based effector molecule
  source 1..76: mol_type = other RNA
  modified_base 1: mod_base = gm
  modified_base 2: mod_base = gm
  modified_base 75: mod_base = cm

SEQ ID NO: 1081 - RNA, 76 nt, synthetic construct; identical to SEQ ID NO: 743
  misc_feature 1..76: note = Description of sequence: tRNA-based effector molecule
  source 1..76: mol_type = other RNA
  modified_base 1: mod_base = gm
  modified_base 2: mod_base = gm
  modified_base 75: mod_base = cm

SEQ ID NO: 1082 - RNA, 76 nt, synthetic construct; identical to SEQ ID NO: 794
  misc_feature 1..76: note = Description of sequence: tRNA-based effector molecule
  source 1..76: mol_type = other RNA
  modified_base 1: mod_base = um
  modified_base 2: mod_base = OTHER; note = 2'-O-methyladenine
  modified_base 75: mod_base = cm

SEQ ID NO: 1083 - RNA, 76 nt, synthetic construct; identical to SEQ ID NO: 627
  misc_feature 1..76: note = Description of sequence: tRNA-based effector molecule
  source 1..76: mol_type = other RNA
  modified_base 1: mod_base = OTHER; note = 2'-O-methyladenine
  modified_base 2: mod_base = cm
  modified_base 13: mod_base = OTHER; note = 2'-fluoro-cytosine
  modified_base 14: mod_base = OTHER; note = 2'-fluoro-adenine
  modified_base 54: mod_base = OTHER; note = 2'-fluoro-uracil
  modified_base 59: mod_base = gm

SEQ ID NO: 1084 - RNA, 76 nt, synthetic construct; identical to SEQ ID NO: 639
  misc_feature 1..76: note = Description of sequence: tRNA-based effector molecule
  source 1..76: mol_type = other RNA
  modified_base 1: mod_base = gm
  modified_base 2: mod_base = cm
  modified_base 13: mod_base = OTHER; note = 2'-fluoro-cytosine
  modified_base 14: mod_base = OTHER; note = 2'-fluoro-adenine
  modified_base 54: mod_base = OTHER; note = 2'-fluoro-uracil
  modified_base 59: mod_base = gm

SEQ ID NO: 1085 - RNA, 76 nt, synthetic construct; identical to SEQ ID NO: 799
  misc_feature 1..76: note = Description of sequence: tRNA-based effector molecule
  source 1..76: mol_type = other RNA
  modified_base 1: mod_base = gm
  modified_base 2: mod_base = cm
  modified_base 13: mod_base = OTHER; note = 2'-fluoro-uracil
  modified_base 14: mod_base = OTHER; note = 2'-fluoro-adenine
  modified_base 54: mod_base = OTHER; note = 2'-fluoro-uracil
  modified_base 59: mod_base = gm

SEQ ID NO: 1086 - RNA, 76 nt, synthetic construct; identical to SEQ ID NO: 641
  misc_feature 1..76: note = Description of sequence: tRNA-based effector molecule
  source 1..76: mol_type = other RNA
  modified_base 1: mod_base = gm
  modified_base 2: mod_base = cm
  modified_base 13: mod_base = OTHER; note = 2'-fluoro-cytosine
  modified_base 14: mod_base = OTHER; note = 2'-fluoro-adenine
  modified_base 54: mod_base = OTHER; note = 2'-fluoro-uracil
  modified_base 59: mod_base = gm

SEQ ID NO: 1087 - RNA, 76 nt, synthetic construct; identical to SEQ ID NO: 652
  misc_feature 1..76: note = Description of sequence: tRNA-based effector molecule
  source 1..76: mol_type = other RNA
  modified_base 1: mod_base = gm
  modified_base 2: mod_base = gm
  modified_base 13: mod_base = OTHER; note = 2'-fluoro-cytosine
  modified_base 14: mod_base = OTHER; note = 2'-fluoro-adenine
  modified_base 54: mod_base = OTHER; note = 2'-fluoro-uracil
  modified_base 59: mod_base = gm

SEQ ID NO: 1088 - RNA, 76 nt, synthetic construct; identical to SEQ ID NO: 802
  misc_feature 1..76: note = Description of sequence: tRNA-based effector molecule
  source 1..76: mol_type = other RNA
  modified_base 1: mod_base = gm
  modified_base 2: mod_base = gm
  modified_base 13: mod_base = OTHER; note = 2'-fluoro-cytosine
  modified_base 14: mod_base = OTHER; note = 2'-fluoro-adenine
  modified_base 54: mod_base = OTHER; note = 2'-fluoro-uracil
  modified_base 59: mod_base = gm

SEQ ID NO: 1089 - RNA, 76 nt, synthetic construct; identical to SEQ ID NO: 702
  misc_feature 1..76: note = Description of sequence: tRNA-based effector molecule
  source 1..76: mol_type = other RNA
  modified_base 1: mod_base = gm
  modified_base 2: mod_base = gm
  modified_base 13: mod_base = OTHER; note = 2'-fluoro-cytosine
  modified_base 14: mod_base = OTHER; note = 2'-fluoro-adenine
  modified_base 54: mod_base = OTHER; note = 2'-fluoro-uracil
  modified_base 59: mod_base = gm

SEQ ID NO: 1090 - RNA, 76 nt, synthetic construct; identical to SEQ ID NO: 710
  misc_feature 1..76: note = Description of sequence: tRNA-based effector molecule
  source 1..76: mol_type = other RNA
  modified_base 1: mod_base = gm
  modified_base 2: mod_base = gm
  modified_base 13: mod_base = OTHER; note = 2'-fluoro-cytosine
  modified_base 14: mod_base = OTHER; note = 2'-fluoro-adenine
  modified_base 54: mod_base = OTHER; note = 2'-fluoro-uracil
  modified_base 59: mod_base = gm

SEQ ID NO: 1091 - RNA, 76 nt, synthetic construct; identical to SEQ ID NO: 805
  misc_feature 1..76: note = Description of sequence: tRNA-based effector molecule
  source 1..76: mol_type = other RNA
  modified_base 1: mod_base = gm
  modified_base 2: mod_base = gm
  modified_base 13: mod_base = OTHER; note = 2'-fluoro-cytosine
  modified_base 14: mod_base = OTHER; note = 2'-fluoro-adenine
  modified_base 54: mod_base = OTHER; note = 2'-fluoro-uracil
  modified_base 59: mod_base = gm

SEQ ID NO: 1092 - RNA, 76 nt, synthetic construct; identical to SEQ ID NO: 743
  misc_feature 1..76: note = Description of sequence: tRNA-based effector molecule
  source 1..76: mol_type = other RNA
  modified_base 1: mod_base = gm
  modified_base 2: mod_base = gm
  modified_base 13: mod_base = OTHER; note = 2'-fluoro-cytosine
  modified_base 14: mod_base = OTHER; note = 2'-fluoro-adenine
  modified_base 54: mod_base = OTHER; note = 2'-fluoro-uracil
  modified_base 59: mod_base = gm

SEQ ID NO: 1093 - RNA, 76 nt, synthetic construct; identical to SEQ ID NO: 794
  misc_feature 1..76: note = Description of sequence: tRNA-based effector molecule
  source 1..76: mol_type = other RNA
  modified_base 1: mod_base = um
  modified_base 2: mod_base = OTHER; note = 2'-O-methyladenine
  modified_base 13: mod_base = OTHER; note = 2'-fluoro-cytosine
  modified_base 14: mod_base = OTHER; note = 2'-fluoro-adenine
  modified_base 54: mod_base = OTHER; note = 2'-fluoro-uracil
  modified_base 59: mod_base = gm

SEQ ID NO: 1094 - RNA, 76 nt, synthetic construct; identical to SEQ ID NO: 627
  misc_feature 1..76: note = Description of sequence: tRNA-based effector molecule
  source 1..76: mol_type = other RNA
  modified_base 1: mod_base = OTHER; note = 2'-O-methyladenine
  modified_base 2: mod_base = cm
  modified_base 3: mod_base = cm
  modified_base 4: mod_base = OTHER; note = 2'-O-methyladenine
  modified_base 5: mod_base = OTHER; note = 2'-O-methyladenine
  modified_base 6: mod_base = cm
  modified_base 16: mod_base = um
  modified_base 17: mod_base = gm
  modified_base 18: mod_base = gm
  modified_base 20: mod_base = um
  modified_base 25: mod_base = cm
  modified_base 33: mod_base = OTHER; note = 2'-fluoro-uracil
  modified_base 41: mod_base = cm
  modified_base 44: mod_base = OTHER; note = 2'-O-methyladenine
  modified_base 45: mod_base = gm
  modified_base 46: mod_base = OTHER; note = 2'-fluoro-guanine
  modified_base 47: mod_base = OTHER; note = 2'-fluoro-uracil
  modified_base 48: mod_base = OTHER; note = 2'-fluoro-uracil
  modified_base 56: mod_base = cm
  modified_base 59: mod_base = gm
  modified_base 73: mod_base = gm

SEQ ID NO: 1095 - RNA, 76 nt, synthetic construct; identical to SEQ ID NO: 639
  misc_feature 1..76: note = Description of sequence: tRNA-based effector molecule
  source 1..76: mol_type = other RNA
  modified_base 1: mod_base = gm
  modified_base 2: mod_base = cm
  modified_base 3: mod_base = cm
  modified_base 4: mod_base = cm
  modified_base 5: mod_base = gm
  modified_base 6: mod_base = OTHER; note = 2'-O-methyladenine
  modified_base 16: mod_base = um
  modified_base 17: mod_base = gm
  modified_base 18: mod_base = gm
  modified_base 20: mod_base = um
  modified_base 25: mod_base = cm
  modified_base 33: mod_base = OTHER; note = 2'-fluoro-uracil
  modified_base 41: mod_base = cm
  modified_base 44: mod_base = OTHER; note = 2'-O-methyladenine
  modified_base 45: mod_base = gm
  modified_base 46: mod_base = OTHER; note = 2'-fluoro-guanine
  modified_base 47: mod_base = OTHER; note = 2'-fluoro-uracil
  modified_base 48: mod_base = OTHER; note = 2'-fluoro-uracil
  modified_base 56: mod_base = cm
  modified_base 59: mod_base = gm
  modified_base 73: mod_base = gm

SEQ ID NO: 1096 - RNA, 76 nt, synthetic construct; identical to SEQ ID NO: 799
  misc_feature 1..76: note = Description of sequence: tRNA-based effector molecule
  source 1..76: mol_type = other RNA
  modified_base 1: mod_base = gm
  modified_base 2: mod_base = cm
  modified_base 3: mod_base = cm
  modified_base 4: mod_base = um
  modified_base 5: mod_base = cm
  modified_base 6: mod_base = cm
  modified_base 16: mod_base = um
  modified_base 17: mod_base = gm
  modified_base 18: mod_base = gm
  modified_base 20: mod_base = um
  modified_base 25: mod_base = cm
  modified_base 33: mod_base = OTHER; note = 2'-fluoro-uracil
  modified_base 41: mod_base = cm
  modified_base 44: mod_base = gm
  modified_base 45: mod_base = gm
  modified_base 46: mod_base = OTHER; note = 2'-fluoro-adenine
  modified_base 47: mod_base = OTHER; note = 2'-fluoro-uracil
  modified_base 48: mod_base = OTHER; note = 2'-fluoro-uracil
  modified_base 56: mod_base = cm
  modified_base 59: mod_base = gm
  modified_base 73: mod_base = gm

SEQ ID NO: 1097 - RNA, 76 nt, synthetic construct; identical to SEQ ID NO: 641
  misc_feature 1..76: note = Description of sequence: tRNA-based effector molecule
  source 1..76: mol_type = other RNA
  modified_base 1: mod_base = gm
  modified_base 2: mod_base = cm
  modified_base 3: mod_base = cm
  modified_base 4: mod_base = um
  modified_base 5: mod_base = cm
  modified_base 6: mod_base = cm
  modified_base 16: mod_base = um
  modified_base 17: mod_base = gm
  modified_base 18: mod_base = gm
  modified_base 20: mod_base = um
  modified_base 25: mod_base = cm
  modified_base 33: mod_base = OTHER; note = 2'-fluoro-uracil
  modified_base 41: mod_base = cm
  modified_base 44: mod_base = OTHER; note = 2'-O-methyladenine
  modified_base 45: mod_base = gm
  modified_base 46: mod_base = OTHER; note = 2'-fluoro-guanine
  modified_base 47: mod_base = OTHER; note = 2'-fluoro-uracil
  modified_base 48: mod_base = OTHER; note = 2'-fluoro-uracil
  modified_base 56: mod_base = cm
  modified_base 59: mod_base = gm
  modified_base 73: mod_base = gm

SEQ ID NO: 1098 - RNA, 76 nt, synthetic construct; identical to SEQ ID NO: 652
  misc_feature 1..76: note = Description of sequence: tRNA-based effector molecule
  source 1..76: mol_type = other RNA
  modified_base 1: mod_base = gm
  modified_base 2: mod_base = gm
  modified_base 3: mod_base = cm
  modified_base 4: mod_base = cm
  modified_base 5: mod_base = cm
  modified_base 6: mod_base = cm
  modified_base 16: mod_base = um
  modified_base 17: mod_base = gm
  modified_base 18: mod_base = gm
  modified_base 20: mod_base = um
  modified_base 25: mod_base = cm
  modified_base 33: mod_base = OTHER; note = 2'-fluoro-uracil
  modified_base 41: mod_base = cm
  modified_base 44: mod_base = OTHER; note = 2'-O-methyladenine
  modified_base 45: mod_base = gm
  modified_base 46: mod_base = OTHER; note = 2'-fluoro-guanine
  modified_base 47: mod_base = OTHER; note = 2'-fluoro-uracil
  modified_base 48: mod_base = OTHER; note = 2'-fluoro-uracil
  modified_base 56: mod_base = cm
  modified_base 59: mod_base = gm
  modified_base 73: mod_base = gm

SEQ ID NO: 1099 - RNA, 76 nt, synthetic construct; identical to SEQ ID NO: 802
  misc_feature 1..76: note = Description of sequence: tRNA-based effector molecule
  source 1..76: mol_type = other RNA
  modified_base 1: mod_base = gm
  modified_base 2: mod_base = gm
  modified_base 3: mod_base = cm
  modified_base 4: mod_base = cm
  modified_base 5: mod_base = cm
  modified_base 6: mod_base = cm
  modified_base 16: mod_base = um
  modified_base 17: mod_base = gm
  modified_base 18: mod_base = gm
  modified_base 20: mod_base = um
  modified_base 25: mod_base = cm
  modified_base 33: mod_base = OTHER; note = 2'-fluoro-uracil
  modified_base 41: mod_base = cm
  modified_base 44: mod_base = OTHER; note = 2'-O-methyladenine
  modified_base 45: mod_base = gm
  modified_base 46: mod_base = OTHER; note = 2'-fluoro-guanine
  modified_base 47: mod_base = OTHER; note = 2'-fluoro-uracil
  modified_base 48: mod_base = OTHER; note = 2'-fluoro-uracil
  modified_base 56: mod_base = cm
  modified_base 59: mod_base = gm
  modified_base 73: mod_base = gm

SEQ ID NO: 1100 - RNA, 76 nt, synthetic construct; identical to SEQ ID NO: 702
  misc_feature 1..76: note = Description of sequence: tRNA-based effector molecule
  source 1..76: mol_type = other RNA
  modified_base 1: mod_base = gm
  modified_base 2: mod_base = gm
  modified_base 3: mod_base = cm
  modified_base 4: mod_base = um
  modified_base 5: mod_base = cm
  modified_base 6: mod_base = cm
  modified_base 16: mod_base = um
  modified_base 17: mod_base = gm
  modified_base 18: mod_base = gm
  modified_base 20: mod_base = um
  modified_base 25: mod_base = cm
  modified_base 33: mod_base = OTHER; note = 2'-fluoro-uracil
  modified_base 41: mod_base = gm
  modified_base 44: mod_base = OTHER; note = 2'-O-methyladenine
  modified_base 45: mod_base = gm
  modified_base 46: mod_base = OTHER; note = 2'-fluoro-guanine
  modified_base 47: mod_base = OTHER; note = 2'-fluoro-uracil
  modified_base 48: mod_base = OTHER; note = 2'-fluoro-uracil
  modified_base 56: mod_base = cm
  modified_base 59: mod_base = gm
  modified_base 73: mod_base = gm

SEQ ID NO: 1101 - RNA, 76 nt, synthetic construct; identical to SEQ ID NO: 710
  misc_feature 1..76: note = Description of sequence: tRNA-based effector molecule
  source 1..76: mol_type = other RNA
  modified_base 1: mod_base = gm
  modified_base 2: mod_base = gm
  modified_base 3: mod_base = cm
  modified_base 4: mod_base = um
  modified_base 5: mod_base = cm
  modified_base 6: mod_base = cm
  modified_base 16: mod_base = um
  modified_base 17: mod_base = gm
  modified_base 18: mod_base = gm
  modified_base 20: mod_base = um
  modified_base 25: mod_base = cm
  modified_base 33: mod_base = OTHER; note = 2'-fluoro-uracil
  modified_base 41: mod_base = cm
  modified_base 44: mod_base = OTHER; note = 2'-O-methyladenine
  modified_base 45: mod_base = gm
  modified_base 46: mod_base = OTHER; note = 2'-fluoro-guanine
  modified_base 47: mod_base = OTHER; note = 2'-fluoro-uracil
  modified_base 48: mod_base = OTHER; note = 2'-fluoro-uracil
  modified_base 56: mod_base = cm
  modified_base 59: mod_base = gm
  modified_base 73: mod_base = gm

SEQ ID NO: 1102 - RNA, 76 nt, synthetic construct; identical to SEQ ID NO: 805
  misc_feature 1..76: note = Description of sequence: tRNA-based effector molecule
  source 1..76: mol_type = other RNA
  modified_base 1: mod_base = gm
  modified_base 2: mod_base = gm
  modified_base 3: mod_base = cm
  modified_base 4: mod_base = um
  modified_base 5: mod_base = cm
  modified_base 6: mod_base = cm
  modified_base 16: mod_base = um
  modified_base 17: mod_base = gm
  modified_base 18: mod_base = gm
  modified_base 20: mod_base = um
  modified_base 25: mod_base = cm
  modified_base 33: mod_base = OTHER; note = 2'-fluoro-uracil
  modified_base 41: mod_base = cm
  modified_base 44: mod_base = OTHER; note = 2'-O-methyladenine
  modified_base 45: mod_base = gm
  modified_base 46: mod_base = OTHER; note = 2'-fluoro-guanine
  modified_base 47: mod_base = OTHER; note = 2'-fluoro-uracil
  modified_base 48: mod_base = OTHER; note = 2'-fluoro-uracil
  modified_base 56: mod_base = cm
  modified_base 59: mod_base = gm
  modified_base 73: mod_base = gm

SEQ ID NO: 1103 - RNA, 76 nt, synthetic construct; identical to SEQ ID NO: 743
  misc_feature 1..76: note = Description of sequence: tRNA-based effector molecule
  source 1..76: mol_type = other RNA
  modified_base 1: mod_base = gm
  modified_base 2: mod_base = gm
  modified_base 3: mod_base = cm
  modified_base 4: mod_base = um
  modified_base 5: mod_base = cm
  modified_base 6: mod_base = cm
  modified_base 16: mod_base = um
  modified_base 17: mod_base = gm
  modified_base 18: mod_base = gm
  modified_base 20: mod_base = um
  modified_base 25: mod_base = cm
  modified_base 33: mod_base = OTHER; note = 2'-fluoro-uracil
  modified_base 41: mod_base = cm
  modified_base 44: mod_base = gm
  modified_base 45: mod_base = gm
  modified_base 46: mod_base = OTHER; note = 2'-fluoro-guanine
  modified_base 47: mod_base = OTHER; note = 2'-fluoro-uracil
  modified_base 48: mod_base = OTHER; note = 2'-fluoro-uracil
  modified_base 56: mod_base = cm
  modified_base 59: mod_base = gm
  modified_base 73: mod_base = gm

SEQ ID NO: 1104 - RNA, 76 nt, synthetic construct; identical to SEQ ID NO: 794
  misc_feature 1..76: note = Description of sequence: tRNA-based effector molecule
  source 1..76: mol_type = other RNA
  modified_base 1: mod_base = um
  modified_base 2: mod_base = OTHER; note = 2'-O-methyladenine
  modified_base 3: mod_base = cm
  modified_base 4: mod_base = OTHER; note = 2'-O-methyladenine
  modified_base 5: mod_base = cm
  modified_base 6: mod_base = cm
  modified_base 16: mod_base = um
  modified_base 17: mod_base = gm
  modified_base 18: mod_base = gm
  modified_base 20: mod_base = um
  modified_base 25: mod_base = cm
  modified_base 33: mod_base = OTHER; note = 2'-fluoro-uracil
  modified_base 41: mod_base = cm
  modified_base 44: mod_base = OTHER; note = 2'-O-methyladenine
  modified_base 45: mod_base = gm
  modified_base 46: mod_base = OTHER; note = 2'-fluoro-guanine
  modified_base 47: mod_base = OTHER; note = 2'-fluoro-uracil
  modified_base 48: mod_base = OTHER; note = 2'-fluoro-uracil
  modified_base 56: mod_base = cm
  modified_base 59: mod_base = gm
  modified_base 73: mod_base = gm

SEQ ID NO: 1105 - RNA, 76 nt, synthetic construct; identical to SEQ ID NO: 627
  misc_feature 1..76: note = Description of sequence: tRNA-based effector molecule
  source 1..76: mol_type = other RNA
  modified_base 1: mod_base = OTHER; note = 2'-O-methyladenine
  modified_base 2: mod_base = cm
  modified_base 3: mod_base = cm
  modified_base 4: mod_base = OTHER; note = 2'-O-methyladenine
  modified_base 5: mod_base = OTHER; note = 2'-O-methyladenine
  modified_base 6: mod_base = cm
  modified_base 16: mod_base = um
  modified_base 17: mod_base = gm
  modified_base 18: mod_base = gm
  modified_base 20: mod_base = um
  modified_base 25: mod_base = cm
  modified_base 33: mod_base = OTHER; note = 2'-fluoro-uracil
  modified_base 41: mod_base = cm
  modified_base 44: mod_base = OTHER; note = 2'-O-methyladenine
  modified_base 45: mod_base = gm
  modified_base 46: mod_base = OTHER; note = 2'-fluoro-guanine
  modified_base 47: mod_base = OTHER; note = 2'-fluoro-uracil
  modified_base 48: mod_base = OTHER; note = 2'-fluoro-uracil
  modified_base 49: mod_base = cm
  modified_base 50: mod_base = cm
  modified_base 51: mod_base = gm
  modified_base 52: mod_base = gm
  modified_base 53: mod_base = gm
  modified_base 54: mod_base = um
  modified_base 56: mod_base = cm
  modified_base 59: mod_base = gm
  modified_base 73: mod_base = gm

SEQ ID NO: 1106 - RNA, 76 nt, synthetic construct; identical to SEQ ID NO: 639
  misc_feature 1..76: note = Description of sequence: tRNA-based effector molecule
  source 1..76: mol_type = other RNA
  modified_base 1: mod_base = gm
  modified_base 2: mod_base = cm
  modified_base 3: mod_base = cm
  modified_base 4: mod_base = cm
  modified_base 5: mod_base = gm
  modified_base 6: mod_base = OTHER; note = 2'-O-methyladenine
  modified_base 16: mod_base = um
  modified_base 17: mod_base = gm
  modified_base 18: mod_base = gm
  modified_base 20: mod_base = um
  modified_base 25: mod_base = cm
  modified_base 33: mod_base = OTHER; note = 2'-fluoro-uracil
  modified_base 41: mod_base = cm
  modified_base 44: mod_base = OTHER; note = 2'-O-methyladenine
  modified_base 45: mod_base = gm
  modified_base 46: mod_base = OTHER; note = 2'-fluoro-guanine
  modified_base 47: mod_base = OTHER; note = 2'-fluoro-uracil
  modified_base 48: mod_base = OTHER; note = 2'-fluoro-uracil
  modified_base 49: mod_base = cm
  modified_base 50: mod_base = cm
  modified_base 51: mod_base = gm
  modified_base 52: mod_base = gm
  modified_base 53: mod_base = gm
  modified_base 54: mod_base = um
  modified_base 56: mod_base = cm
  modified_base 59: mod_base = gm
  modified_base 73: mod_base = gm

SEQ ID NO: 1107 - RNA, 76 nt, synthetic construct; identical to SEQ ID NO: 799
  misc_feature 1..76: note = Description of sequence: tRNA-based effector molecule
  source 1..76: mol_type = other RNA
  modified_base 1: mod_base = gm
  modified_base 2: mod_base = cm
  modified_base 3: mod_base = cm
  modified_base 4: mod_base = um
  modified_base 5: mod_base = cm
  modified_base 6: mod_base = cm
  modified_base 16: mod_base = um
  modified_base 17: mod_base = gm
  modified_base 18: mod_base = gm
  modified_base 20: mod_base = um
  modified_base 25: mod_base = cm
  modified_base 33: mod_base = OTHER; note = 2'-fluoro-uracil
  modified_base 41: mod_base = cm
  modified_base 44: mod_base = gm
  modified_base 45: mod_base = gm
  modified_base 46: mod_base = OTHER; note = 2'-fluoro-adenine
  modified_base 47: mod_base = OTHER; note = 2'-fluoro-uracil
  modified_base 48: mod_base = OTHER; note = 2'-fluoro-uracil
  modified_base 49: mod_base = gm
  modified_base 50: mod_base = cm
  modified_base 51: mod_base = gm
  modified_base 52: mod_base = gm
  modified_base 53: mod_base = gm
  modified_base 54: mod_base = um
  modified_base 56: mod_base = cm
  modified_base 59: mod_base = gm
  modified_base 73: mod_base = gm

SEQ ID NO: 1108 - RNA, 76 nt, synthetic construct; identical to SEQ ID NO: 641
  misc_feature 1..76: note = Description of sequence: tRNA-based effector molecule
  source 1..76: mol_type = other RNA
  modified_base 1: mod_base = gm
  modified_base 2: mod_base = cm
  modified_base 3: mod_base = cm
  modified_base 4: mod_base = um
  modified_base 5: mod_base = cm
  modified_base 6: mod_base = cm
  modified_base 16: mod_base = um
  modified_base 17: mod_base = gm
  modified_base 18: mod_base = gm
  modified_base 20: mod_base = um
  modified_base 25: mod_base = cm
  modified_base 33: mod_base = OTHER; note = 2'-fluoro-uracil
  modified_base 41: mod_base = cm
  modified_base 44: mod_base = OTHER; note = 2'-O-methyladenine
  modified_base 45: mod_base = gm
  modified_base 46: mod_base = OTHER; note = 2'-fluoro-guanine
  modified_base 47: mod_base = OTHER; note = 2'-fluoro-uracil
  modified_base 48: mod_base = OTHER; note = 2'-fluoro-uracil
  modified_base 49: mod_base = cm
  modified_base 50: mod_base = cm
  modified_base 51: mod_base = gm
  modified_base 52: mod_base = gm
  modified_base 53: mod_base = gm
  modified_base 54: mod_base = um
  modified_base 56: mod_base = cm
  modified_base 59: mod_base = gm
  modified_base 73: mod_base = gm

SEQ ID NO: 1109 - RNA, 76 nt, synthetic construct; identical to SEQ ID NO: 652
  misc_feature 1..76: note = Description of sequence: tRNA-based effector molecule
  source 1..76: mol_type = other RNA
  modified_base 1: mod_base = gm
  modified_base 2: mod_base = gm
  modified_base 3: mod_base = cm
  modified_base 4: mod_base = cm
  modified_base 5: mod_base = cm
  modified_base 6: mod_base = cm
  modified_base 16: mod_base = um
  modified_base 17: mod_base = gm
  modified_base 18: mod_base = gm
  modified_base 20: mod_base = um
  modified_base 25: mod_base = cm
  modified_base 33: mod_base = OTHER; note = 2'-fluoro-uracil
  modified_base 41: mod_base = cm
  modified_base 44: mod_base = OTHER; note = 2'-O-methyladenine
  modified_base 45: mod_base = gm
  modified_base 46: mod_base = OTHER; note = 2'-fluoro-guanine
  modified_base 47: mod_base = OTHER; note = 2'-fluoro-uracil
  modified_base 48: mod_base = OTHER; note = 2'-fluoro-uracil
  modified_base 49: mod_base = cm
  modified_base 50: mod_base = cm
  modified_base 51: mod_base = gm
  modified_base 52: mod_base = gm
  modified_base 53: mod_base = gm
  modified_base 54: mod_base = um
  modified_base 56: mod_base = cm
  modified_base 59: mod_base = gm
  modified_base 73: mod_base = gm

SEQ ID NO: 1110 - RNA, 76 nt, synthetic construct; identical to SEQ ID NO: 802
  misc_feature 1..76: note = Description of sequence: tRNA-based effector molecule
  source 1..76: mol_type = other RNA
  modified_base 1: mod_base = gm
  modified_base 2: mod_base = gm
  modified_base 3: mod_base = cm
  modified_base 4: mod_base = cm
  modified_base 5: mod_base = cm
  modified_base 6: mod_base = cm
  modified_base 16: mod_base = um
  modified_base 17: mod_base = gm
  modified_base 18: mod_base = gm
  modified_base 20: mod_base = um
  modified_base 25: mod_base = cm
  modified_base 33: mod_base = OTHER; note = 2'-fluoro-uracil
  modified_base 41: mod_base = cm
  modified_base 44: mod_base = OTHER; note = 2'-O-methyladenine
  modified_base 45: mod_base = gm
  modified_base 46: mod_base = OTHER; note = 2'-fluoro-guanine
  modified_base 47: mod_base = OTHER; note = 2'-fluoro-uracil
  modified_base 48: mod_base = OTHER; note = 2'-fluoro-uracil
  modified_base 49: mod_base = gm
  modified_base 50: mod_base = cm
  modified_base 51: mod_base = gm
  modified_base 52: mod_base = gm
  modified_base 53: mod_base = gm
  modified_base 54: mod_base = um
  modified_base 56: mod_base = cm
  modified_base 59: mod_base = gm
  modified_base 73: mod_base = gm

SEQ ID NO: 1111 - RNA, 76 nt, synthetic construct; identical to SEQ ID NO: 702
  misc_feature 1..76: note = Description of sequence: tRNA-based effector molecule
  source 1..76: mol_type = other RNA
  modified_base 1: mod_base = gm
  modified_base 2: mod_base = gm
  modified_base 3: mod_base = cm
  modified_base 4: mod_base = um
  modified_base 5: mod_base = cm
  modified_base 6: mod_base = cm
  modified_base 16: mod_base = um
  modified_base 17: mod_base = gm
  modified_base 18: mod_base = gm
  modified_base 20: mod_base = um
  modified_base 25: mod_base = cm
  modified_base 33: mod_base = OTHER; note = 2'-fluoro-uracil
  modified_base 41: mod_base = gm
  modified_base 44: mod_base = OTHER; note = 2'-O-methyladenine
  modified_base 45: mod_base = gm
  modified_base 46: mod_base = OTHER; note = 2'-fluoro-guanine
  modified_base 47: mod_base = OTHER; note = 2'-fluoro-uracil
  modified_base 48: mod_base = OTHER; note = 2'-fluoro-uracil
  modified_base 49: mod_base = cm
  modified_base 50: mod_base = cm
  modified_base 51: mod_base = gm
  modified_base 52: mod_base = gm
  modified_base 53: mod_base = gm
  modified_base 54: mod_base = um
  modified_base 56: mod_base = cm
  modified_base 59: mod_base = gm
  modified_base 73: mod_base = gm

SEQ ID NO: 1112 - RNA, 76 nt, synthetic construct; identical to SEQ ID NO: 710
  misc_feature 1..76: note = Description of sequence: tRNA-based effector molecule
  source 1..76: mol_type = other RNA
  modified_base 1: mod_base = gm
  modified_base 2: mod_base = gm
  modified_base 3: mod_base = cm
  modified_base 4: mod_base = um
  modified_base 5: mod_base = cm
  modified_base 6: mod_base = cm
  modified_base 16: mod_base = um
  modified_base 17: mod_base = gm
  modified_base 18: mod_base = gm
  modified_base 20: mod_base = um
  modified_base 25: mod_base = cm
  modified_base 33: mod_base = OTHER; note = 2'-fluoro-uracil
  modified_base 41: mod_base = cm
  modified_base 44: mod_base = OTHER; note = 2'-O-methyladenine
  modified_base 45: mod_base = gm
  modified_base 46: mod_base = OTHER; note = 2'-fluoro-guanine
  modified_base 47: mod_base = OTHER; note = 2'-fluoro-uracil
  modified_base 48: mod_base = OTHER; note = 2'-fluoro-uracil
  modified_base 49: mod_base = cm
  modified_base 50: mod_base = cm
  modified_base 51: mod_base = gm
  modified_base 52: mod_base = gm
  modified_base 53: mod_base = gm
  modified_base 54: mod_base = um
  modified_base 56: mod_base = cm
  modified_base 59: mod_base = gm
  modified_base 73: mod_base = gm

SEQ ID NO: 1113 - RNA, 76 nt, synthetic construct; identical to SEQ ID NO: 805
  misc_feature 1..76: note = Description of sequence: tRNA-based effector molecule
  source 1..76: mol_type = other RNA
  modified_base 1: mod_base = gm
  modified_base 2: mod_base = gm
  modified_base 3: mod_base = cm
  modified_base 4: mod_base = um
  modified_base 5: mod_base = cm
  modified_base 6: mod_base = cm
  modified_base 16: mod_base = um
  modified_base 17: mod_base = gm
  modified_base 18: mod_base = gm
  modified_base 20: mod_base = um
  modified_base 25: mod_base = cm
  modified_base 33: mod_base = OTHER; note = 2'-fluoro-uracil
  modified_base 41: mod_base = cm
  modified_base 44: mod_base = OTHER; note = 2'-O-methyladenine
  modified_base 45: mod_base = gm
  modified_base 46: mod_base = OTHER; note = 2'-fluoro-guanine
  modified_base 47: mod_base = OTHER; note = 2'-fluoro-uracil
  modified_base 48: mod_base = OTHER; note = 2'-fluoro-uracil
  modified_base 49: mod_base = gm
  modified_base 50: mod_base = cm
  modified_base 51: mod_base = gm
  modified_base 52: mod_base = gm
  modified_base 53: mod_base = gm
  modified_base 54: mod_base = um
  modified_base 56: mod_base = cm
  modified_base 59: mod_base = gm
  modified_base 73: mod_base = gm

SEQ ID NO: 1114 - RNA, 76 nt, synthetic construct; identical to SEQ ID NO: 743
  misc_feature 1..76: note = Description of sequence: tRNA-based effector molecule
  source 1..76: mol_type = other RNA
  modified_base 1: mod_base = gm
  modified_base 2: mod_base = gm
  modified_base 3: mod_base = cm
  modified_base 4: mod_base = um
  modified_base 5: mod_base = cm
  modified_base 6: mod_base = cm
  modified_base 16: mod_base = um
  modified_base 17: mod_base = gm
  modified_base 18: mod_base = gm
  modified_base 20: mod_base = um
  modified_base 25: mod_base = cm
  modified_base 33: mod_base = OTHER; note = 2'-fluoro-uracil
  modified_base 41: mod_base = cm
  modified_base 44: mod_base = gm
  modified_base 45: mod_base = gm
  modified_base 46: mod_base = OTHER; note = 2'-fluoro-guanine
  modified_base 47: mod_base = OTHER; note = 2'-fluoro-uracil
  modified_base 48: mod_base = OTHER; note = 2'-fluoro-uracil
  modified_base 49: mod_base = cm
  modified_base 50: mod_base = cm
  modified_base 51: mod_base = gm
  modified_base 52: mod_base = gm
  modified_base 53: mod_base = gm
  modified_base 54: mod_base = um
  modified_base 56: mod_base = cm
  modified_base 59: mod_base = gm
  modified_base 73: mod_base = gm

SEQ ID NO: 1115 - RNA, 76 nt, synthetic construct; identical to SEQ ID NO: 794
  misc_feature 1..76: note = Description of sequence: tRNA-based effector molecule
  source 1..76: mol_type = other RNA
  modified_base 1: mod_base = um
  modified_base 2: mod_base = OTHER; note = 2'-O-methyladenine
  modified_base 3: mod_base = cm
  modified_base 4: mod_base = OTHER; note = 2'-O-methyladenine
  modified_base 5: mod_base = cm
  modified_base 6: mod_base = cm
  modified_base 16: mod_base = um
  modified_base 17: mod_base = gm
  modified_base 18: mod_base = gm
  modified_base 20: mod_base = um
  modified_base 25: mod_base = cm
  modified_base 33: mod_base = OTHER; note = 2'-fluoro-uracil
  modified_base 41: mod_base = cm
  modified_base 44: mod_base = OTHER; note = 2'-O-methyladenine
  modified_base 45: mod_base = gm
  modified_base 46: mod_base = OTHER; note = 2'-fluoro-guanine
  modified_base 47: mod_base = OTHER; note = 2'-fluoro-uracil
  modified_base 48: mod_base = OTHER; note = 2'-fluoro-uracil
  modified_base 49: mod_base = cm
  modified_base 50: mod_base = cm
  modified_base 51: mod_base = gm
  modified_base 52: mod_base = gm
  modified_base 53: mod_base = gm
  modified_base 54: mod_base = um
  modified_base 56: mod_base = cm
  modified_base 59: mod_base = gm
  modified_base 73: mod_base = gm

SEQ ID NO: 1116 - RNA, 76 nt, synthetic construct; identical to SEQ ID NO: 627
  misc_feature 1..76: note = Description of sequence: tRNA-based effector molecule
  source 1..76: mol_type = other RNA
  modified_base 1: mod_base = OTHER; note = 2'-O-methyladenine
  modified_base 2: mod_base = cm
  modified_base 3: mod_base = cm
  modified_base 4: mod_base = OTHER; note = 2'-O-methyladenine
  modified_base 5: mod_base = OTHER; note = 2'-O-methyladenine
  modified_base 6: mod_base = cm
  modified_base 10: mod_base = gm
  modified_base 11: mod_base = cm
  modified_base 12: mod_base = gm
  modified_base 13: mod_base = cm
  modified_base 22: mod_base = gm
  modified_base 23: mod_base = cm
  modified_base 24: mod_base = gm
  modified_base 25: mod_base = cm
  modified_base 49: mod_base = cm
  modified_base 50: mod_base = cm
  modified_base 51: mod_base = gm
  modified_base 52: mod_base = gm
  modified_base 53: mod_base = gm
  modified_base 54: mod_base = um
  modified_base 61: mod_base = cm
  modified_base 62: mod_base = cm
  modified_base 63: mod_base = OTHER; note = 2'-fluoro-cytosine
  modified_base 64: mod_base = gm
  modified_base 65: mod_base = gm
  modified_base 66: mod_base = cm
  modified_base 67: mod_base = gm
  modified_base 68: mod_base = um
  modified_base 73: mod_base = gm

SEQ ID NO: 1117 - RNA, 76 nt, synthetic construct; identical to SEQ ID NO: 639
  misc_feature 1..76: note = Description of sequence: tRNA-based effector molecule
  source 1..76: mol_type = other RNA
  modified_base 1: mod_base = gm
  modified_base 2: mod_base = cm
  modified_base 3: mod_base = cm
  modified_base 4: mod_base = cm
  modified_base 5: mod_base = gm
  modified_base 6: mod_base = OTHER; note = 2'-O-methyladenine
  modified_base 10: mod_base = gm
  modified_base 11: mod_base = cm
  modified_base 12: mod_base = gm
  modified_base 13: mod_base = cm
  modified_base 22: mod_base = gm
  modified_base 23: mod_base = cm
  modified_base 24: mod_base = gm
  modified_base 25: mod_base = cm
  modified_base 49: mod_base = cm
  modified_base 50: mod_base = cm
  modified_base 51: mod_base = gm
  modified_base 52: mod_base = gm
  modified_base 53: mod_base = gm
  modified_base 54: mod_base = um
  modified_base 61: mod_base = cm
  modified_base 62: mod_base = cm
  modified_base 63: mod_base = OTHER; note = 2'-fluoro-cytosine
  modified_base 64: mod_base = gm
  modified_base 65: mod_base = gm
  modified_base 66: mod_base = cm
  modified_base 67: mod_base = um
  modified_base 68: mod_base = cm
  modified_base 73: mod_base = gm

SEQ ID NO: 1118 - RNA, 76 nt, synthetic construct; identical to SEQ ID NO: 799
  misc_feature 1..76: note = Description of sequence: tRNA-based effector molecule
  source 1..76: mol_type = other RNA
  modified_base 1: mod_base = gm
  modified_base 2: mod_base = cm
  modified_base 3: mod_base = cm
  modified_base 4: mod_base = um
  modified_base 5: mod_base = cm
  modified_base 6: mod_base = cm
  modified_base 10: mod_base = gm
  modified_base 11: mod_base = cm
  modified_base 12: mod_base = cm
  modified_base 13: mod_base = um
  modified_base 22: mod_base = OTHER; note = 2'-O-methyladenine
  modified_base 23: mod_base = gm
  modified_base 24: mod_base = gm
  modified_base 25: mod_base = cm
  modified_base 49: mod_base = gm
  modified_base 50: mod_base = cm
  modified_base 51: mod_base = gm
  modified_base 52: mod_base = gm
  modified_base 53: mod_base = gm
  modified_base 54: mod_base = um
  modified_base 61: mod_base = cm
  modified_base 62: mod_base = cm
  modified_base 63: mod_base = OTHER; note = 2'-fluoro-cytosine
  modified_base 64: mod_base = gm
  modified_base 65: mod_base = um
  modified_base 66: mod_base = cm
  modified_base 67: mod_base = gm
  modified_base 68: mod_base = gm
  modified_base 73: mod_base = gm

SEQ ID NO: 1119 - RNA, 76 nt, synthetic construct; identical to SEQ ID NO: 641
  misc_feature 1..76: note = Description of sequence: tRNA-based effector molecule
  source 1..76: mol_type = other RNA
  modified_base 1: mod_base = gm
  modified_base 2: mod_base = cm
  modified_base 3: mod_base = cm
  modified_base 4: mod_base = um
  modified_base 5: mod_base = cm
  modified_base 6: mod_base = cm
  modified_base 10: mod_base = gm
  modified_base 11: mod_base = cm
  modified_base 12: mod_base = gm
  modified_base 13: mod_base = cm
  modified_base 22: mod_base = gm
  modified_base 23: mod_base = cm
  modified_base 24: mod_base = gm
  modified_base 25: mod_base = cm
  modified_base 49: mod_base = cm
  modified_base 50: mod_base = cm
  modified_base 51: mod_base = gm
  modified_base 52: mod_base = gm
  modified_base 53: mod_base = gm
  modified_base 54: mod_base = um
  modified_base 61: mod_base = cm
  modified_base 62: mod_base = cm
  modified_base 63: mod_base = OTHER; note = 2'-fluoro-cytosine
  modified_base 64: mod_base = gm
  modified_base 65: mod_base = gm
  modified_base 66: mod_base = cm
  modified_base 67: mod_base = gm
  modified_base 68: mod_base = gm
  modified_base 73: mod_base = gm

SEQ ID NO: 1120 - RNA, 76 nt, synthetic construct; identical to SEQ ID NO: 652
  misc_feature 1..76: note = Description of sequence: tRNA-based effector molecule
  source 1..76: mol_type = other RNA
  modified_base 1: mod_base = gm
  modified_base 2: mod_base = gm
  modified_base 3: mod_base = cm
  modified_base 4: mod_base = cm
  modified_base 5: mod_base = cm
  modified_base 6: mod_base = cm
  modified_base 10: mod_base = gm
  modified_base 11: mod_base = cm
  modified_base 12: mod_base = gm
  modified_base 13: mod_base = cm
  modified_base 22: mod_base = gm
  modified_base 23: mod_base = cm
  modified_base 24: mod_base = gm
  modified_base 25: mod_base = cm
  modified_base 49: mod_base = cm
  modified_base 50: mod_base = cm
  modified_base 51: mod_base = gm
  modified_base 52: mod_base = gm
  modified_base 53: mod_base = gm
  modified_base 54: mod_base = um
  modified_base 61: mod_base = cm
  modified_base 62: mod_base = cm
  modified_base 63: mod_base = OTHER; note = 2'-fluoro-cytosine
  modified_base 64: mod_base = gm
  modified_base 65: mod_base = gm
  modified_base 66: mod_base = um
  modified_base 67: mod_base = gm
  modified_base 68: mod_base = gm
  modified_base 73: mod_base = gm

SEQ ID NO: 1121 - RNA, 76 nt, synthetic construct; identical to SEQ ID NO: 802
  misc_feature 1..76: note = Description of sequence: tRNA-based effector molecule
  source 1..76: mol_type = other RNA
  modified_base 1: mod_base = gm
  modified_base 2: mod_base = gm
  modified_base 3: mod_base = cm
  modified_base 4: mod_base = cm
  modified_base 5: mod_base = cm
  modified_base 6: mod_base = cm
  modified_base 10: mod_base = gm
  modified_base 11: mod_base = cm
  modified_base 12: mod_base = gm
  modified_base 13: mod_base = cm
  modified_base 22: mod_base = gm
  modified_base 23: mod_base = cm
  modified_base 24: mod_base = gm
  modified_base 25: mod_base = cm
  modified_base 49: mod_base = gm
  modified_base 50: mod_base = cm
  modified_base 51: mod_base = gm
  modified_base 52: mod_base = gm
  modified_base 53: mod_base = gm
  modified_base 54: mod_base = um
  modified_base 61: mod_base = cm
  modified_base 62: mod_base = cm
  modified_base 63: mod_base = OTHER; note = 2'-fluoro-cytosine
  modified_base 64: mod_base = gm
  modified_base 65: mod_base = cm
  modified_base 66: mod_base = cm
  modified_base 67: mod_base = gm
  modified_base 68: mod_base = gm
  modified_base 73: mod_base = gm

SEQ ID NO: 1122 - RNA, 76 nt, synthetic construct; identical to SEQ ID NO: 702
  misc_feature 1..76: note = Description of sequence: tRNA-based effector molecule
  source 1..76: mol_type = other RNA
  modified_base 1: mod_base = gm
  modified_base 2: mod_base = gm
  modified_base 3: mod_base = cm
  modified_base 4: mod_base = um
  modified_base 5: mod_base = cm
  modified_base 6: mod_base = cm
  modified_base 10: mod_base = gm
  modified_base 11: mod_base = cm
  modified_base 12: mod_base = gm
  modified_base 13: mod_base = cm
  modified_base 22: mod_base = gm
  modified_base 23: mod_base = cm
  modified_base 24: mod_base = gm
  modified_base 25: mod_base = cm
  modified_base 49: mod_base = cm
  modified_base 50: mod_base = cm
  modified_base 51: mod_base = gm
  modified_base 52: mod_base = gm
  modified_base 53: mod_base = gm
  modified_base 54: mod_base = um
  modified_base 61: mod_base = cm
  modified_base 62: mod_base = cm
  modified_base 63: mod_base = OTHER; note = 2'-fluoro-cytosine
  modified_base 64: mod_base = gm
  modified_base 65: mod_base = gm
  modified_base 66: mod_base = cm
  modified_base 67: mod_base = gm
  modified_base 68: mod_base = gm
  modified_base 73: mod_base = gm

SEQ ID NO: 1123 - RNA, 76 nt, synthetic construct; identical to SEQ ID NO: 710
  misc_feature 1..76: note = Description of sequence: tRNA-based effector molecule
  source 1..76: mol_type = other RNA
  modified_base 1: mod_base = gm
  modified_base 2: mod_base = gm
  modified_base 3: mod_base = cm
  modified_base 4: mod_base = um
  modified_base 5: mod_base = cm
  modified_base 6: mod_base = cm
  modified_base 10: mod_base = gm
  modified_base 11: mod_base = cm
  modified_base 12: mod_base = gm
  modified_base 13: mod_base = cm
  modified_base 22: mod_base = gm
  modified_base 23: mod_base = cm
  modified_base 24: mod_base = gm
  modified_base 25: mod_base = cm
  modified_base 49: mod_base = cm
  modified_base 50: mod_base = cm
  modified_base 51: mod_base = gm
  modified_base 52: mod_base = gm
  modified_base 53: mod_base = gm
  modified_base 54: mod_base = um
  modified_base 61: mod_base = cm
  modified_base 62: mod_base = cm
  modified_base 63: mod_base = OTHER; note = 2'-fluoro-cytosine
  modified_base 64: mod_base = gm
  modified_base 65: mod_base = gm
  modified_base 66: mod_base = cm
  modified_base 67: mod_base = gm
  modified_base 68: mod_base = gm
  modified_base 73: mod_base = gm

SEQ ID NO: 1124 - RNA, 76 nt, synthetic construct; identical to SEQ ID NO: 805
  misc_feature 1..76: note = Description of sequence: tRNA-based effector molecule
  source 1..76: mol_type = other RNA
  modified_base 1: mod_base = gm
  modified_base 2: mod_base = gm
  modified_base 3: mod_base = cm
  modified_base 4: mod_base = um
  modified_base 5: mod_base = cm
  modified_base 6: mod_base = cm
  modified_base 10: mod_base = gm
  modified_base 11: mod_base = cm
  modified_base 12: mod_base = gm
  modified_base 13: mod_base = cm
  modified_base 22: mod_base = gm
  modified_base 23: mod_base = cm
  modified_base 24: mod_base = gm
  modified_base 25: mod_base = cm
  modified_base 49: mod_base = gm
  modified_base 50: mod_base = cm
  modified_base 51: mod_base = gm
  modified_base 52: mod_base = gm
  modified_base 53: mod_base = gm
  modified_base 54: mod_base = um
  modified_base 61: mod_base = cm
  modified_base 62: mod_base = cm
  modified_base 63: mod_base = OTHER; note = 2'-fluoro-cytosine
  modified_base 64: mod_base = gm
  modified_base 65: mod_base = cm
  modified_base 66: mod_base = cm
  modified_base 67: mod_base = gm
  modified_base 68: mod_base = gm
  modified_base 73: mod_base = gm

SEQ ID NO: 1125 - RNA, 76 nt, synthetic construct; identical to SEQ ID NO: 743
  misc_feature 1..76: note = Description of sequence: tRNA-based effector molecule
  source 1..76: mol_type = other RNA
  modified_base 1: mod_base = gm
  modified_base 2: mod_base = gm
  modified_base 3: mod_base = cm
  modified_base 4: mod_base = um
  modified_base 5: mod_base = cm
  modified_base 6: mod_base = cm
  modified_base 10: mod_base = gm
  modified_base 11: mod_base = cm
  modified_base 12: mod_base = gm
  modified_base 13: mod_base = cm
  modified_base 22: mod_base = gm
  modified_base 23: mod_base = cm
  modified_base 24: mod_base = gm
  modified_base 25: mod_base = cm
  modified_base 49: mod_base = cm
  modified_base 50: mod_base = cm
  modified_base 51: mod_base = gm
  modified_base 52: mod_base = gm
  modified_base 53: mod_base = gm
  modified_base 54: mod_base = um
  modified_base 61: mod_base = cm
  modified_base 62: mod_base = cm
  modified_base 63: mod_base = OTHER; note = 2'-fluoro-cytosine
  modified_base 64: mod_base = gm
  modified_base 65: mod_base = gm
  modified_base 66: mod_base = cm
  modified_base 67: mod_base = gm
  modified_base 68: mod_base = gm
  modified_base 73: mod_base = gm

SEQ ID NO: 1126 - RNA, 76 nt, synthetic construct; identical to SEQ ID NO: 794
  misc_feature 1..76: note = Description of sequence: tRNA-based effector molecule
  source 1..76: mol_type = other RNA
  modified_base 1: mod_base = um
  modified_base 2: mod_base = OTHER; note = 2'-O-methyladenine
  modified_base 3: mod_base = cm
  modified_base 4: mod_base = OTHER; note = 2'-O-methyladenine
  modified_base 5: mod_base = cm
  modified_base 6: mod_base = cm
  modified_base 10: mod_base = gm
  modified_base 11: mod_base = cm
  modified_base 12: mod_base = gm
  modified_base 13: mod_base = cm
  modified_base 22: mod_base = gm
  modified_base 23: mod_base = cm
  modified_base 24: mod_base = gm
  modified_base 25: mod_base = cm
  modified_base 49: mod_base = cm
  modified_base 50: mod_base = cm
  modified_base 51: mod_base = gm
  modified_base 52: mod_base = gm
  modified_base 53: mod_base = gm
  modified_base 54: mod_base = um
  modified_base 61: mod_base = cm
  modified_base 62: mod_base = cm
  modified_base 63: mod_base = OTHER; note = 2'-fluoro-cytosine
  modified_base 64: mod_base = gm
  modified_base 65: mod_base = gm
  modified_base 66: mod_base = cm
  modified_base 67: mod_base = gm
  modified_base 68: mod_base = gm
  modified_base 73: mod_base = gm

SEQ ID NO: 1127 - RNA, 76 nt, synthetic construct; identical to SEQ ID NO: 627
  misc_feature 1..76: note = Description of sequence: tRNA-based effector molecule
  source 1..76: mol_type = other RNA
  modified_base 1: mod_base = OTHER; note = 2'-O-methyladenine
  modified_base 2: mod_base = cm
  modified_base 3: mod_base = cm
  modified_base 4: mod_base = OTHER; note = 2'-O-methyladenine
  modified_base 5: mod_base = OTHER; note = 2'-O-methyladenine
  modified_base 6: mod_base = cm
  modified_base 10: mod_base = gm
  modified_base 11: mod_base = cm
  modified_base 12: mod_base = gm
  modified_base 13: mod_base = cm
  modified_base 17: mod_base = gm
  modified_base 18: mod_base = gm
  modified_base 22: mod_base = gm
  modified_base 23: mod_base = cm
  modified_base 24: mod_base = gm
  modified_base 25: mod_base = cm
  modified_base 33: mod_base = OTHER; note = 2'-fluoro-uracil
  modified_base 41: mod_base = OTHER; note = 2'-fluoro-cytosine
  modified_base 42: mod_base = OTHER; note = 2'-O-methyladenine
  modified_base 43: mod_base = OTHER; note = 2'-O-methyladenine
  modified_base 44: mod_base = OTHER; note = 2'-fluoro-adenine
  modified_base 49: mod_base = cm
  modified_base 50: mod_base = cm
  modified_base 51: mod_base = gm
  modified_base 52: mod_base = gm
  modified_base 53: mod_base = gm
  modified_base 61: mod_base = cm
  modified_base 62: mod_base = cm
  modified_base 63: mod_base = OTHER; note = 2'-fluoro-cytosine
  modified_base 64: mod_base = gm
  modified_base 65: mod_base = gm
  modified_base 66: mod_base = cm
  modified_base 67: mod_base = gm
  modified_base 68: mod_base = um
  modified_base 73: mod_base = gm

SEQ ID NO: 1128 - RNA, 76 nt, synthetic construct; identical to SEQ ID NO: 639
  misc_feature 1..76: note = Description of sequence: tRNA-based effector molecule
  source 1..76: mol_type = other RNA
  modified_base 1: mod_base = gm
  modified_base 2: mod_base = cm
  modified_base 3: mod_base = cm
  modified_base 4: mod_base = cm
  modified_base 5: mod_base = gm
  modified_base 6: mod_base = OTHER; note = 2'-O-methyladenine
  modified_base 10: mod_base = gm
  modified_base 11: mod_base = cm
  modified_base 12: mod_base = gm
  modified_base 13: mod_base = cm
  modified_base 17: mod_base = gm
  modified_base 18: mod_base = gm
  modified_base 22: mod_base = gm
  modified_base 23: mod_base = cm
  modified_base 24: mod_base = gm
  modified_base 25: mod_base = cm
  modified_base 33: mod_base = OTHER; note = 2'-fluoro-uracil
  modified_base 41: mod_base = OTHER; note = 2'-fluoro-cytosine
  modified_base 42: mod_base = OTHER; note = 2'-O-methyladenine
  modified_base 43: mod_base = OTHER; note = 2'-O-methyladenine
  modified_base 44: mod_base = OTHER; note = 2'-fluoro-adenine
  modified_base 49: mod_base = cm
  modified_base 50: mod_base = cm
  modified_base 51: mod_base = gm
  modified_base 52: mod_base = gm
  modified_base 53: mod_base = gm
  modified_base 61: mod_base = cm
  modified_base 62: mod_base = cm
  modified_base 63: mod_base = OTHER; note = 2'-fluoro-cytosine
  modified_base 64: mod_base = gm
  modified_base 65: mod_base = gm
  modified_base 66: mod_base = cm
  modified_base 67: mod_base = um
  modified_base 68: mod_base = cm
  modified_base 73: mod_base = gm

SEQ ID NO: 1129 - RNA, 76 nt, synthetic construct; identical to SEQ ID NO: 799
  misc_feature 1..76: note = Description of sequence: tRNA-based effector molecule
  source 1..76: mol_type = other RNA
  modified_base 1: mod_base = gm
  modified_base 2: mod_base = cm
  modified_base 3: mod_base = cm
  modified_base 4: mod_base = um
  modified_base 5: mod_base = cm
  modified_base 6: mod_base = cm
  modified_base 10: mod_base = gm
  modified_base 11: mod_base = cm
  modified_base 12: mod_base = cm
  modified_base 13: mod_base = um
  modified_base 17: mod_base = gm
  modified_base 18: mod_base = gm
  modified_base 22: mod_base = OTHER; note = 2'-O-methyladenine
  modified_base 23: mod_base = gm
  modified_base 24: mod_base = gm
  modified_base 25: mod_base = cm
  modified_base 33: mod_base = OTHER; note = 2'-fluoro-uracil
  modified_base 41: mod_base = OTHER; note = 2'-fluoro-cytosine
  modified_base 42: mod_base = gm
  modified_base 43: mod_base = gm
  modified_base 44: mod_base = OTHER; note = 2'-fluoro-guanine
  modified_base 49: mod_base = gm
  modified_base 50: mod_base = cm
  modified_base 51: mod_base = gm
  modified_base 52: mod_base = gm
  modified_base 53: mod_base = gm
  modified_base 61: mod_base = cm
  modified_base 62: mod_base = cm
  modified_base 63: mod_base = OTHER; note = 2'-fluoro-cytosine
  modified_base 64: mod_base = gm
  modified_base 65: mod_base = um
  modified_base 66: mod_base = cm
  modified_base 67: mod_base = gm
  modified_base 68: mod_base = gm
  modified_base 73: mod_base = gm

SEQ ID NO: 1130 - RNA, 76 nt, synthetic construct; identical to SEQ ID NO: 641
  misc_feature 1..76: note = Description of sequence: tRNA-based effector molecule
  source 1..76: mol_type = other RNA
  modified_base 1: mod_base = gm
  modified_base 2: mod_base = cm
  modified_base 3: mod_base = cm
  modified_base 4: mod_base = um
  modified_base 5: mod_base = cm
  modified_base 6: mod_base = cm
  modified_base 10: mod_base = gm
  modified_base 11: mod_base = cm
  modified_base 12: mod_base = gm
  modified_base 13: mod_base = cm
  modified_base 17: mod_base = gm
  modified_base 18: mod_base = gm
  modified_base 22: mod_base = gm
  modified_base 23: mod_base = cm
  modified_base 24: mod_base = gm
  modified_base 25: mod_base = cm
  modified_base 33: mod_base = OTHER; note = 2'-fluoro-uracil
  modified_base 41: mod_base = OTHER; note = 2'-fluoro-cytosine
  modified_base 42: mod_base = OTHER; note = 2'-O-methyladenine
  modified_base 43: mod_base = cm
  modified_base 44: mod_base = OTHER; note = 2'-fluoro-adenine
  modified_base 49: mod_base = cm
  modified_base 50: mod_base = cm
  modified_base 51: mod_base = gm
  modified_base 52: mod_base = gm
  modified_base 53: mod_base = gm
  modified_base 61: mod_base = cm
  modified_base 62: mod_base = cm
  modified_base 63: mod_base = OTHER; note = 2'-fluoro-cytosine
  modified_base 64: mod_base = gm
  modified_base 65: mod_base = gm
  modified_base 66: mod_base = cm
  modified_base 67: mod_base = gm
  modified_base 68: mod_base = gm
  modified_base 73: mod_base = gm

SEQ ID NO: 1131 - RNA, 76 nt, synthetic construct; identical to SEQ ID NO: 652
  misc_feature 1..76: note = Description of sequence: tRNA-based effector molecule
  source 1..76: mol_type = other RNA
  modified_base 1: mod_base = gm
  modified_base 2: mod_base = gm
  modified_base 3: mod_base = cm
  modified_base 4: mod_base = cm
  modified_base 5: mod_base = cm
  modified_base 6: mod_base = cm
  modified_base 10: mod_base = gm
  modified_base 11: mod_base = cm
  modified_base 12: mod_base = gm
  modified_base 13: mod_base = cm
  modified_base 17: mod_base = gm
  modified_base 18: mod_base = gm
  modified_base 22: mod_base = gm
  modified_base 23: mod_base = cm
  modified_base 24: mod_base = gm
  modified_base 25: mod_base = cm
  modified_base 33: mod_base = OTHER; note = 2'-fluoro-uracil
  modified_base 41: mod_base = OTHER; note = 2'-fluoro-cytosine
  modified_base 42: mod_base = OTHER; note = 2'-O-methyladenine
  modified_base 43: mod_base = OTHER; note = 2'-O-methyladenine
  modified_base 44: mod_base = OTHER; note = 2'-fluoro-adenine
  modified_base 49: mod_base = cm
  modified_base 50: mod_base = cm
  modified_base 51: mod_base = gm
  modified_base 52: mod_base = gm
  modified_base 53: mod_base = gm
  modified_base 61: mod_base = cm
  modified_base 62: mod_base = cm
  modified_base 63: mod_base = OTHER; note = 2'-fluoro-cytosine
  modified_base 64: mod_base = gm
  modified_base 65: mod_base = gm
  modified_base 66: mod_base = um
  modified_base 67: mod_base = gm
  modified_base 68: mod_base = gm
  modified_base 73: mod_base = gm

SEQ ID NO: 1132 - RNA, 76 nt, synthetic construct; identical to SEQ ID NO: 802
  misc_feature 1..76: note = Description of sequence: tRNA-based effector molecule
  source 1..76: mol_type = other RNA
  modified_base 1: mod_base = gm
  modified_base 2: mod_base = gm
  modified_base 3: mod_base = cm
  modified_base 4: mod_base = cm
  modified_base 5: mod_base = cm
  modified_base 6: mod_base = cm
  modified_base 10: mod_base = gm
  modified_base 11: mod_base = cm
  modified_base 12: mod_base = gm
  modified_base 13: mod_base = cm
  modified_base 17: mod_base = gm
  modified_base 18: mod_base = gm
  modified_base 22: mod_base = gm
  modified_base 23: mod_base = cm
  modified_base 24: mod_base = gm
  modified_base 25: mod_base = cm
  modified_base 33: mod_base = OTHER; note = 2'-fluoro-uracil
  modified_base 41: mod_base = OTHER; note = 2'-fluoro-cytosine
  modified_base 42: mod_base = OTHER; note = 2'-O-methyladenine
  modified_base 43: mod_base = OTHER; note = 2'-O-methyladenine
  modified_base 44: mod_base = OTHER; note = 2'-fluoro-adenine
  modified_base 49: mod_base = gm
  modified_base 50: mod_base = cm
  modified_base 51: mod_base = gm
  modified_base 52: mod_base = gm
  modified_base 53: mod_base = gm
  modified_base 61: mod_base = cm
  modified_base 62: mod_base = cm
  modified_base 63: mod_base = OTHER; note = 2'-fluoro-cytosine
  modified_base 64: mod_base = gm
  modified_base 65: mod_base = cm
  modified_base 66: mod_base = cm
  modified_base 67: mod_base = gm
  modified_base 68: mod_base = gm
  modified_base 73: mod_base = gm

SEQ ID NO: 1133 - RNA, 76 nt, synthetic construct; identical to SEQ ID NO: 702
  misc_feature 1..76: note = Description of sequence: tRNA-based effector molecule
  source 1..76: mol_type = other RNA
  modified_base 1: mod_base = gm
  modified_base 2: mod_base = gm
  modified_base 3: mod_base = cm
  modified_base 4: mod_base = um
  modified_base 5: mod_base = cm
  modified_base 6: mod_base = cm
  modified_base 10: mod_base = gm
  modified_base 11: mod_base = cm
  modified_base 12: mod_base = gm
  modified_base 13: mod_base = cm
  modified_base 17: mod_base = gm
  modified_base 18: mod_base = gm
  modified_base 22: mod_base = gm
  modified_base 23: mod_base = cm
  modified_base 24: mod_base = gm
  modified_base 25: mod_base = cm
  modified_base 33: mod_base = OTHER; note = 2'-fluoro-uracil
  modified_base 41: mod_base = OTHER; note = 2'-fluoro-guanine
  modified_base 42: mod_base = gm
  modified_base 43: mod_base = um
  modified_base 44: mod_base = OTHER; note = 2'-fluoro-adenine
  modified_base 49: mod_base = cm
  modified_base 50: mod_base = cm
  modified_base 51: mod_base = gm
  modified_base 52: mod_base = gm
  modified_base 53: mod_base = gm
  modified_base 61: mod_base = cm
  modified_base 62: mod_base = cm
  modified_base 63: mod_base = OTHER; note = 2'-fluoro-cytosine
  modified_base 64: mod_base = gm
  modified_base 65: mod_base = gm
  modified_base 66: mod_base = cm
  modified_base 67: mod_base = gm
  modified_base 68: mod_base = gm
  modified_base 73: mod_base = gm

SEQ ID NO: 1134 - RNA, 76 nt, synthetic construct; identical to SEQ ID NO: 710
  misc_feature 1..76: note = Description of sequence: tRNA-based effector molecule
  source 1..76: mol_type = other RNA
  modified_base 1: mod_base = gm
  modified_base 2: mod_base = gm
  modified_base 3: mod_base = cm
  modified_base 4: mod_base = um
  modified_base 5: mod_base = cm
  modified_base 6: mod_base = cm
  modified_base 10: mod_base = gm
  modified_base 11: mod_base = cm
  modified_base 12: mod_base = gm
  modified_base 13: mod_base = cm
  modified_base 17: mod_base = gm
  modified_base 18: mod_base = gm
  modified_base 22: mod_base = gm
  modified_base 23: mod_base = cm
  modified_base 24: mod_base = gm
  modified_base 25: mod_base = cm
  modified_base 33: mod_base = OTHER; note = 2'-fluoro-uracil
  modified_base 41: mod_base = OTHER; note = 2'-fluoro-cytosine
  modified_base 42: mod_base = gm
  modified_base 43: mod_base = OTHER; note = 2'-O-methyladenine
  modified_base 44: mod_base = OTHER; note = 2'-fluoro-adenine
  modified_base 49: mod_base = cm
  modified_base 50: mod_base = cm
  modified_base 51: mod_base = gm
  modified_base 52: mod_base = gm
  modified_base 53: mod_base = gm
  modified_base 61: mod_base = cm
  modified_base 62: mod_base = cm
  modified_base 63: mod_base = OTHER; note = 2'-fluoro-cytosine
  modified_base 64: mod_base = gm
  modified_base 65: mod_base = gm
  modified_base 66: mod_base = cm
  modified_base 67: mod_base = gm
  modified_base 68: mod_base = gm
  modified_base 73: mod_base = gm

SEQ ID NO: 1135 - RNA, 76 nt, synthetic construct; identical to SEQ ID NO: 805
  misc_feature 1..76: note = Description of sequence: tRNA-based effector molecule
  source 1..76: mol_type = other RNA
  modified_base 1: mod_base = gm
  modified_base 2: mod_base = gm
  modified_base 3: mod_base = cm
  modified_base 4: mod_base = um
  modified_base 5: mod_base = cm
  modified_base 6: mod_base = cm
  modified_base 10: mod_base = gm
  modified_base 11: mod_base = cm
  modified_base 12: mod_base = gm
  modified_base 13: mod_base = cm
  modified_base 17: mod_base = gm
  modified_base 18: mod_base = gm
  modified_base 22: mod_base = gm
  modified_base 23: mod_base = cm
  modified_base 24: mod_base = gm
  modified_base 25: mod_base = cm
  modified_base 33: mod_base = OTHER; note = 2'-fluoro-uracil
  modified_base 41: mod_base = OTHER; note = 2'-fluoro-cytosine
  modified_base 42: mod_base = OTHER; note = 2'-O-methyladenine
  modified_base 43: mod_base = OTHER; note = 2'-O-methyladenine
  modified_base 44: mod_base = OTHER; note = 2'-fluoro-adenine
  modified_base 49: mod_base = gm
  modified_base 50: mod_base = cm
  modified_base 51: mod_base = gm
  modified_base 52: mod_base = gm
  modified_base 53: mod_base = gm
  modified_base 61: mod_base = cm
  modified_base 62: mod_base = cm
  modified_base 63: mod_base = OTHER; note = 2'-fluoro-cytosine
  modified_base 64: mod_base = gm
  modified_base 65: mod_base = cm
  modified_base 66: mod_base = cm
  modified_base 67: mod_base = gm
  modified_base 68: mod_base = gm
  modified_base 73: mod_base = gm

SEQ ID NO: 1136 - RNA, 76 nt, synthetic construct; identical to SEQ ID NO: 743
  misc_feature 1..76: note = Description of sequence: tRNA-based effector molecule
  source 1..76: mol_type = other RNA
  modified_base 1: mod_base = gm
  modified_base 2: mod_base = gm
  modified_base 3: mod_base = cm
  modified_base 4: mod_base = um
  modified_base 5: mod_base = cm
  modified_base 6: mod_base = cm
  modified_base 10: mod_base = gm
  modified_base 11: mod_base = cm
  modified_base 12: mod_base = gm
  modified_base 13: mod_base = cm
  modified_base 17: mod_base = gm
  modified_base 18: mod_base = gm
  modified_base 22: mod_base = gm
  modified_base 23: mod_base = cm
  modified_base 24: mod_base = gm
  modified_base 25: mod_base = cm
  modified_base 33: mod_base = OTHER; note = 2'-fluoro-uracil
  modified_base 41: mod_base = OTHER; note = 2'-fluoro-cytosine
  modified_base 42: mod_base = OTHER; note = 2'-O-methyladenine
  modified_base 43: mod_base = OTHER; note = 2'-O-methyladenine
  modified_base 44: mod_base = OTHER; note = 2'-fluoro-guanine
  modified_base 49: mod_base = cm
  modified_base 50: mod_base = cm
  modified_base 51: mod_base = gm
  modified_base 52: mod_base = gm
  modified_base 53: mod_base = gm
  modified_base 61: mod_base = cm
  modified_base 62: mod_base = cm
  modified_base 63: mod_base = OTHER; note = 2'-fluoro-cytosine
  modified_base 64: mod_base = gm
  modified_base 65: mod_base = gm
  modified_base 66: mod_base = cm
  modified_base 67: mod_base = gm
  modified_base 68: mod_base = gm
  modified_base 73: mod_base = gm

SEQ ID NO: 1137 - RNA, 76 nt, synthetic construct; identical to SEQ ID NO: 794
  misc_feature 1..76: note = Description of sequence: tRNA-based effector molecule
  source 1..76: mol_type = other RNA
  modified_base 1: mod_base = um
  modified_base 2: mod_base = OTHER; note = 2'-O-methyladenine
  modified_base 3: mod_base = cm
  modified_base 4: mod_base = OTHER; note = 2'-O-methyladenine
  modified_base 5: mod_base = cm
  modified_base 6: mod_base = cm
  modified_base 10: mod_base = gm
  modified_base 11: mod_base = cm
  modified_base 12: mod_base = gm
  modified_base 13: mod_base = cm
  modified_base 17: mod_base = gm
  modified_base 18: mod_base = gm
  modified_base 22: mod_base = gm
  modified_base 23: mod_base = cm
  modified_base 24: mod_base = gm
  modified_base 25: mod_base = cm
  modified_base 33: mod_base = OTHER; note = 2'-fluoro-uracil
  modified_base 41: mod_base = OTHER; note = 2'-fluoro-cytosine
  modified_base 42: mod_base = OTHER; note = 2'-O-methyladenine
  modified_base 43: mod_base = OTHER; note = 2'-O-methyladenine
  modified_base 44: mod_base = OTHER; note = 2'-fluoro-adenine
  modified_base 49: mod_base = cm
  modified_base 50: mod_base = cm
  modified_base 51: mod_base = gm
  modified_base 52: mod_base = gm
  modified_base 53: mod_base = gm
  modified_base 61: mod_base = cm
  modified_base 62: mod_base = cm
  modified_base 63: mod_base = OTHER; note = 2'-fluoro-cytosine
  modified_base 64: mod_base = gm
  modified_base 65: mod_base = gm
  modified_base 66: mod_base = cm
  modified_base 67: mod_base = gm
  modified_base 68: mod_base = gm
  modified_base 73: mod_base = gm

SEQ ID NO: 1138 - RNA, 76 nt, synthetic construct; identical to SEQ ID NO: 627
  misc_feature 1..76: note = Description of sequence: tRNA-based effector molecule
  source 1..76: mol_type = other RNA
  modified_base 1: mod_base = OTHER; note = 2'-O-methyladenine
  modified_base 2: mod_base = cm
  modified_base 3: mod_base = cm
  modified_base 4: mod_base = OTHER; note = 2'-O-methyladenine
  modified_base 5: mod_base = OTHER; note = 2'-O-methyladenine
  modified_base 6: mod_base = cm
  modified_base 10: mod_base = gm
  modified_base 11: mod_base = cm
  modified_base 12: mod_base = gm
  modified_base 13: mod_base = cm
  modified_base 14: mod_base = OTHER; note = 2'-O-methyladenine
  modified_base 15: mod_base = OTHER; note = 2'-fluoro-adenine
  modified_base 16: mod_base = um
  modified_base 17: mod_base = gm
  modified_base 18: mod_base = gm
  modified_base 19: mod_base = OTHER; note = 2'-fluoro-adenine
  modified_base 20: mod_base = um
  modified_base 22: mod_base = gm
  modified_base 23: mod_base = cm
  modified_base 24: mod_base = gm
  modified_base 25: mod_base = cm
  modified_base 33: mod_base = OTHER; note = 2'-fluoro-uracil
  modified_base 44: mod_base = OTHER; note = 2'-O-methyladenine
  modified_base 45: mod_base = gm
  modified_base 46: mod_base = OTHER; note = 2'-fluoro-guanine
  modified_base 47: mod_base = OTHER; note = 2'-fluoro-uracil
  modified_base 48: mod_base = OTHER; note = 2'-fluoro-uracil
  modified_base 56: mod_base = cm
  modified_base 59: mod_base = gm
  modified_base 61: mod_base = cm
  modified_base 62: mod_base = cm
  modified_base 63: mod_base = OTHER; note = 2'-fluoro-cytosine
  modified_base 64: mod_base = gm
  modified_base 65: mod_base = gm
  modified_base 66: mod_base = cm
  modified_base 67: mod_base = gm
  modified_base 68: mod_base = um
  modified_base 73: mod_base = gm

SEQ ID NO: 1139 - RNA, 76 nt, synthetic construct; identical to SEQ ID NO: 639
  misc_feature 1..76: note = Description of sequence: tRNA-based effector molecule
  source 1..76: mol_type = other RNA
  modified_base 1: mod_base = gm
  modified_base 2: mod_base = cm
  modified_base 3: mod_base = cm
  modified_base 4: mod_base = cm
  modified_base 5: mod_base = gm
  modified_base 6: mod_base = OTHER; note = 2'-O-methyladenine
  modified_base 10: mod_base = gm
  modified_base 11: mod_base = cm
  modified_base 12: mod_base = gm
  modified_base 13: mod_base = cm
  modified_base 14: mod_base = OTHER; note = 2'-O-methyladenine
  modified_base 15: mod_base = OTHER; note = 2'-fluoro-adenine
  modified_base 16: mod_base = um
  modified_base 17: mod_base = gm
  modified_base 18: mod_base = gm
  modified_base 19: mod_base = OTHER; note = 2'-fluoro-adenine
  modified_base 20: mod_base = um
  modified_base 22: mod_base = gm
  modified_base 23: mod_base = cm
  modified_base 24: mod_base = gm
  modified_base 25: mod_base = cm
  modified_base 33: mod_base = OTHER; note = 2'-fluoro-uracil
  modified_base 44: mod_base = OTHER; note = 2'-O-methyladenine
  modified_base 45: mod_base = gm
  modified_base 46: mod_base = OTHER; note = 2'-fluoro-guanine
  modified_base 47: mod_base = OTHER; note = 2'-fluoro-uracil
  modified_base 48: mod_base = OTHER; note = 2'-fluoro-uracil
  modified_base 56: mod_base = cm
  modified_base 59: mod_base = gm
  modified_base 61: mod_base = cm
  modified_base 62: mod_base = cm
  modified_base 63: mod_base = OTHER; note = 2'-fluoro-cytosine
  modified_base 64: mod_base = gm
  modified_base 65: mod_base = gm
  modified_base 66: mod_base = cm
  modified_base 67: mod_base = um
  modified_base 68: mod_base = cm
  modified_base 73: mod_base = gm

SEQ ID NO: 1140 - RNA, 76 nt, synthetic construct; identical to SEQ ID NO: 799
  misc_feature 1..76: note = Description of sequence: tRNA-based effector molecule
  source 1..76: mol_type = other RNA
  modified_base 1: mod_base = gm
  modified_base 2: mod_base = cm
  modified_base 3: mod_base = cm
  modified_base 4: mod_base = um
  modified_base 5: mod_base = cm
  modified_base 6: mod_base = cm
  modified_base 10: mod_base = gm
  modified_base 11: mod_base = cm
  modified_base 12: mod_base = cm
  modified_base 13: mod_base = um
  modified_base 14: mod_base = OTHER; note = 2'-O-methyladenine
  modified_base 15: mod_base = OTHER; note = 2'-fluoro-adenine
  modified_base 16: mod_base = um
  modified_base 17: mod_base = gm
  modified_base 18: mod_base = gm
  modified_base 19: mod_base = OTHER; note = 2'-fluoro-adenine
  modified_base 20: mod_base = um
  modified_base 22: mod_base = OTHER; note = 2'-O-methyladenine
  modified_base 23: mod_base = gm
  modified_base 24: mod_base = gm
  modified_base 25: mod_base = cm
  modified_base 33: mod_base = OTHER; note = 2'-fluoro-uracil
  modified_base 44: mod_base = gm
  modified_base 45: mod_base = gm
  modified_base 46: mod_base = OTHER; note = 2'-fluoro-adenine
  modified_base 47: mod_base = OTHER; note = 2'-fluoro-uracil
  modified_base 48: mod_base = OTHER; note = 2'-fluoro-uracil
  modified_base 56: mod_base = cm
  modified_base 59: mod_base = gm
  modified_base 61: mod_base = cm
  modified_base 62: mod_base = cm
  modified_base 63: mod_base = OTHER; note = 2'-fluoro-cytosine
  modified_base 64: mod_base = gm
  modified_base 65: mod_base = um
  modified_base 66: mod_base = cm
  modified_base 67: mod_base = gm
  modified_base 68: mod_base = gm
  modified_base 73: mod_base = gm

SEQ ID NO: 1141 - RNA, 76 nt, synthetic construct; identical to SEQ ID NO: 641
  misc_feature 1..76: note = Description of sequence: tRNA-based effector molecule
  source 1..76: mol_type = other RNA
  modified_base 1: mod_base = gm
  modified_base 2: mod_base = cm
  modified_base 3: mod_base = cm
  modified_base 4: mod_base = um
  modified_base 5: mod_base = cm
  modified_base 6: mod_base = cm
  modified_base 10: mod_base = gm
  modified_base 11: mod_base = cm
  modified_base 12: mod_base = gm
  modified_base 13: mod_base = cm
  modified_base 14: mod_base = OTHER; note = 2'-O-methyladenine
  modified_base 15: mod_base = OTHER; note = 2'-fluoro-adenine
  modified_base 16: mod_base = um
  modified_base 17: mod_base = gm
  modified_base 18: mod_base = gm
  modified_base 19: mod_base = OTHER; note = 2'-fluoro-adenine
  modified_base 20: mod_base = um
  modified_base 22: mod_base = gm
  modified_base 23: mod_base = cm
  modified_base 24: mod_base = gm
  modified_base 25: mod_base = cm
  modified_base 33: mod_base = OTHER; note = 2'-fluoro-uracil
  modified_base 44: mod_base = OTHER; note = 2'-O-methyladenine
  modified_base 45: mod_base = gm
  modified_base 46: mod_base = OTHER; note = 2'-fluoro-guanine
  modified_base 47: mod_base = OTHER; note = 2'-fluoro-uracil
  modified_base 48: mod_base = OTHER; note = 2'-fluoro-uracil
  modified_base 56: mod_base = cm
  modified_base 59: mod_base = gm
  modified_base 61: mod_base = cm
  modified_base 62: mod_base = cm
  modified_base 63: mod_base = OTHER; note = 2'-fluoro-cytosine
  modified_base 64: mod_base = gm
  modified_base 65: mod_base = gm
  modified_base 66: mod_base = cm
  modified_base 67: mod_base = gm
  modified_base 68: mod_base = gm
  modified_base 73: mod_base = gm

SEQ ID NO: 1142 - RNA, 76 nt, synthetic construct; identical to SEQ ID NO: 652
  misc_feature 1..76: note = Description of sequence: tRNA-based effector molecule
  source 1..76: mol_type = other RNA
  modified_base 1: mod_base = gm
  modified_base 2: mod_base = gm
  modified_base 3: mod_base = cm
  modified_base 4: mod_base = cm
  modified_base 5: mod_base = cm
  modified_base 6: mod_base = cm
  modified_base 10: mod_base = gm
  modified_base 11: mod_base = cm
  modified_base 12: mod_base = gm
  modified_base 13: mod_base = cm
  modified_base 14: mod_base = OTHER; note = 2'-O-methyladenine
  modified_base 15: mod_base = OTHER; note = 2'-fluoro-adenine
  modified_base 16: mod_base = um
  modified_base 17: mod_base = gm
  modified_base 18: mod_base = gm
  modified_base 19: mod_base = OTHER; note = 2'-fluoro-adenine
  modified_base 20: mod_base = um
  modified_base 22: mod_base = gm
  modified_base 23: mod_base = cm
  modified_base 24: mod_base = gm
  modified_base 25: mod_base = cm
  modified_base 33: mod_base = OTHER; note = 2'-fluoro-uracil
  modified_base 44: mod_base = OTHER; note = 2'-O-methyladenine
  modified_base 45: mod_base = gm
  modified_base 46: mod_base = OTHER; note = 2'-fluoro-guanine
  modified_base 47: mod_base = OTHER; note = 2'-fluoro-uracil
  modified_base 48: mod_base = OTHER; note = 2'-fluoro-uracil
  modified_base 56: mod_base = cm
  modified_base 59: mod_base = gm
  modified_base 61: mod_base = cm
  modified_base 62: mod_base = cm
  modified_base 63: mod_base = OTHER; note = 2'-fluoro-cytosine
  modified_base 64: mod_base = gm
  modified_base 65: mod_base = gm
  modified_base 66: mod_base = um
  modified_base 67: mod_base = gm
  modified_base 68: mod_base = gm
  modified_base 73: mod_base = gm

SEQ ID NO: 1143 - RNA, 76 nt, synthetic construct; identical to SEQ ID NO: 802
  misc_feature 1..76: note = Description of sequence: tRNA-based effector molecule
  source 1..76: mol_type = other RNA
  modified_base 1: mod_base = gm
  modified_base 2: mod_base = gm
  modified_base 3: mod_base = cm
  modified_base 4: mod_base = cm
  modified_base 5: mod_base = cm
  modified_base 6: mod_base = cm
  modified_base 10: mod_base = gm
  modified_base 11: mod_base = cm
  modified_base 12: mod_base = gm
  modified_base 13: mod_base = cm
  modified_base 14: mod_base = OTHER; note = 2'-O-methyladenine
  modified_base 15: mod_base = OTHER; note = 2'-fluoro-adenine
  modified_base 16: mod_base = um
  modified_base 17: mod_base = gm
  modified_base 18: mod_base = gm
  modified_base 19: mod_base = OTHER; note = 2'-fluoro-adenine
  modified_base 20: mod_base = um
  modified_base 22: mod_base = gm
  modified_base 23: mod_base = cm
  modified_base 24: mod_base = gm
  modified_base 25: mod_base = cm
  modified_base 33: mod_base = OTHER; note = 2'-fluoro-uracil
  modified_base 44: mod_base = OTHER; note = 2'-O-methyladenine
  modified_base 45: mod_base = gm
  modified_base 46: mod_base = OTHER; note = 2'-fluoro-guanine
  modified_base 47: mod_base = OTHER; note = 2'-fluoro-uracil
  modified_base 48: mod_base = OTHER; note = 2'-fluoro-uracil
  modified_base 56: mod_base = cm
  modified_base 59: mod_base = gm
  modified_base 61: mod_base = cm
  modified_base 62: mod_base = cm
  modified_base 63: mod_base = OTHER; note = 2'-fluoro-cytosine
  modified_base 64: mod_base = gm
  modified_base 65: mod_base = cm
  modified_base 66: mod_base = cm
  modified_base 67: mod_base = gm
  modified_base 68: mod_base = gm
  modified_base 73: mod_base = gm

SEQ ID NO: 1144 - RNA, 76 nt, synthetic construct; identical to SEQ ID NO: 702
  misc_feature 1..76: note = Description of sequence: tRNA-based effector molecule
  source 1..76: mol_type = other RNA
  modified_base 1: mod_base = gm
  modified_base 2: mod_base = gm
  modified_base 3: mod_base = cm
  modified_base 4: mod_base = um
  modified_base 5: mod_base = cm
  modified_base 6: mod_base = cm
  modified_base 10: mod_base = gm
  modified_base 11: mod_base = cm
  modified_base 12: mod_base = gm
  modified_base 13: mod_base = cm
  modified_base 14: mod_base = OTHER; note = 2'-O-methyladenine
  modified_base 15: mod_base = OTHER; note = 2'-fluoro-adenine
  modified_base 16: mod_base = um
  modified_base 17: mod_base = gm
  modified_base 18: mod_base = gm
  modified_base 19: mod_base = OTHER; note = 2'-fluoro-adenine
  modified_base 20: mod_base = um
  modified_base 22: mod_base = gm
  modified_base 23: mod_base = cm
  modified_base 24: mod_base = gm
  modified_base 25: mod_base = cm
  modified_base 33: mod_base = OTHER; note = 2'-fluoro-uracil
  modified_base 44: mod_base = OTHER; note = 2'-O-methyladenine
  modified_base 45: mod_base = gm
  modified_base 46: mod_base = OTHER; note = 2'-fluoro-guanine
  modified_base 47: mod_base = OTHER; note = 2'-fluoro-uracil
  modified_base 48: mod_base = OTHER; note = 2'-fluoro-uracil
  modified_base 56: mod_base = cm
  modified_base 59: mod_base = gm
  modified_base 61: mod_base = cm
  modified_base 62: mod_base = cm
  modified_base 63: mod_base = OTHER; note = 2'-fluoro-cytosine
  modified_base 64: mod_base = gm
  modified_base 65: mod_base = gm
  modified_base 66: mod_base = cm
  modified_base 67: mod_base = gm
  modified_base 68: mod_base = gm
  modified_base 73: mod_base = gm

SEQ ID NO: 1145 - RNA, 76 nt, synthetic construct; identical to SEQ ID NO: 710
  misc_feature 1..76: note = Description of sequence: tRNA-based effector molecule
  source 1..76: mol_type = other RNA
  modified_base 1: mod_base = gm
  modified_base 2: mod_base = gm
  modified_base 3: mod_base = cm
  modified_base 4: mod_base = um
  modified_base 5: mod_base = cm
  modified_base 6: mod_base = cm
  modified_base 10: mod_base = gm
  modified_base 11: mod_base = cm
  modified_base 12: mod_base = gm
  modified_base 13: mod_base = cm
  modified_base 14: mod_base = OTHER; note = 2'-O-methyladenine
  modified_base 15: mod_base = OTHER; note = 2'-fluoro-adenine
  modified_base 16: mod_base = um
  modified_base 17: mod_base = gm
  modified_base 18: mod_base = gm
  modified_base 19: mod_base = OTHER; note = 2'-fluoro-adenine
  modified_base 20: mod_base = um
  modified_base 22: mod_base = gm
  modified_base 23: mod_base = cm
  modified_base 24: mod_base = gm
  modified_base 25: mod_base = cm
  modified_base 33: mod_base = OTHER; note = 2'-fluoro-uracil
  modified_base 44: mod_base = OTHER; note = 2'-O-methyladenine
  modified_base 45: mod_base = gm
  modified_base 46: mod_base = OTHER; note = 2'-fluoro-guanine
  modified_base 47: mod_base = OTHER; note = 2'-fluoro-uracil
  modified_base 48: mod_base = OTHER; note = 2'-fluoro-uracil
  modified_base 56: mod_base = cm
  modified_base 59: mod_base = gm
  modified_base 61: mod_base = cm
  modified_base 62: mod_base = cm
  modified_base 63: mod_base = OTHER; note = 2'-fluoro-cytosine
  modified_base 64: mod_base = gm
  modified_base 65: mod_base = gm
  modified_base 66: mod_base = cm
  modified_base 67: mod_base = gm
  modified_base 68: mod_base = gm
  modified_base 73: mod_base = gm

SEQ ID NO: 1146 - RNA, 76 nt, synthetic construct; identical to SEQ ID NO: 805
  misc_feature 1..76: note = Description of sequence: tRNA-based effector molecule
  source 1..76: mol_type = other RNA
  modified_base 1: mod_base = gm
  modified_base 2: mod_base = gm
  modified_base 3: mod_base = cm
  modified_base 4: mod_base = um
  modified_base 5: mod_base = cm
  modified_base 6: mod_base = cm
  modified_base 10: mod_base = gm
  modified_base 11: mod_base = cm
  modified_base 12: mod_base = gm
  modified_base 13: mod_base = cm
  modified_base 14: mod_base = OTHER; note = 2'-O-methyladenine
  modified_base 15: mod_base = OTHER; note = 2'-fluoro-adenine
  modified_base 16: mod_base = um
  modified_base 17: mod_base = gm
  modified_base 18: mod_base = gm
  modified_base 19: mod_base = OTHER; note = 2'-fluoro-adenine
  modified_base 20: mod_base = um
  modified_base 22: mod_base = gm
  modified_base 23: mod_base = cm
  modified_base 24: mod_base = gm
  modified_base 25: mod_base = cm
  modified_base 33: mod_base = OTHER; note = 2'-fluoro-uracil
  modified_base 44: mod_base = OTHER; note = 2'-O-methyladenine
  modified_base 45: mod_base = gm
  modified_base 46: mod_base = OTHER; note = 2'-fluoro-guanine
  modified_base 47: mod_base = OTHER; note = 2'-fluoro-uracil
  modified_base 48: mod_base = OTHER; note = 2'-fluoro-uracil
  modified_base 56: mod_base = cm
  modified_base 59: mod_base = gm
  modified_base 61: mod_base = cm
  modified_base 62: mod_base = cm
  modified_base 63: mod_base = OTHER; note = 2'-fluoro-cytosine
  modified_base 64: mod_base = gm
  modified_base 65: mod_base = cm
  modified_base 66: mod_base = cm
  modified_base 67: mod_base = gm
  modified_base 68: mod_base = gm
  modified_base 73: mod_base = gm

SEQ ID NO: 1147 - RNA, 76 nt, synthetic construct; identical to SEQ ID NO: 743
  misc_feature 1..76: note = Description of sequence: tRNA-based effector molecule
  source 1..76: mol_type = other RNA
  modified_base 1: mod_base = gm
  modified_base 2: mod_base = gm
  modified_base 3: mod_base = cm
  modified_base 4: mod_base = um
  modified_base 5: mod_base = cm
  modified_base 6: mod_base = cm
  modified_base 10: mod_base = gm
  modified_base 11: mod_base = cm
  modified_base 12: mod_base = gm
  modified_base 13: mod_base = cm
  modified_base 14: mod_base = OTHER; note = 2'-O-methyladenine
  modified_base 15: mod_base = OTHER; note = 2'-fluoro-adenine
  modified_base 16: mod_base = um
  modified_base 17: mod_base = gm
  modified_base 18: mod_base = gm
  modified_base 19: mod_base = OTHER; note = 2'-fluoro-adenine
  modified_base 20: mod_base = um
  modified_base 22: mod_base = gm
  modified_base 23: mod_base = cm
  modified_base 24: mod_base = gm
  modified_base 25: mod_base = cm
  modified_base 33: mod_base = OTHER; note = 2'-fluoro-uracil
  modified_base 44: mod_base = gm
  modified_base 45: mod_base = gm
  modified_base 46: mod_base = OTHER; note = 2'-fluoro-guanine
  modified_base 47: mod_base = OTHER; note = 2'-fluoro-uracil
  modified_base 48: mod_base = OTHER; note = 2'-fluoro-uracil
  modified_base 56: mod_base = cm
  modified_base 59: mod_base = gm
  modified_base 61: mod_base = cm
  modified_base 62: mod_base = cm
  modified_base 63: mod_base = OTHER; note = 2'-fluoro-cytosine
  modified_base 64: mod_base = gm
  modified_base 65: mod_base = gm
  modified_base 66: mod_base = cm
  modified_base 67: mod_base = gm
  modified_base 68: mod_base = gm
  modified_base 73: mod_base = gm

SEQ ID NO: 1148 - RNA, 76 nt, synthetic construct; identical to SEQ ID NO: 794
  misc_feature 1..76: note = Description of sequence: tRNA-based effector molecule
  source 1..76: mol_type = other RNA
  modified_base 1: mod_base = um
  modified_base 2: mod_base = OTHER; note = 2'-O-methyladenine
  modified_base 3: mod_base = cm
  modified_base 4: mod_base = OTHER; note = 2'-O-methyladenine
  modified_base 5: mod_base = cm
  modified_base 6: mod_base = cm
  modified_base 10: mod_base = gm
  modified_base 11: mod_base = cm
  modified_base 12: mod_base = gm
  modified_base 13: mod_base = cm
  modified_base 14: mod_base = OTHER; note = 2'-O-methyladenine
  modified_base 15: mod_base = OTHER; note = 2'-fluoro-adenine
  modified_base 16: mod_base = um
  modified_base 17: mod_base = gm
  modified_base 18: mod_base = gm
  modified_base 19: mod_base = OTHER; note = 2'-fluoro-adenine
  modified_base 20: mod_base = um
  modified_base 22: mod_base = gm
  modified_base 23: mod_base = cm
  modified_base 24: mod_base = gm
  modified_base 25: mod_base = cm
  modified_base 33: mod_base = OTHER; note = 2'-fluoro-uracil
  modified_base 44: mod_base = OTHER; note = 2'-O-methyladenine
  modified_base 45: mod_base = gm
  modified_base 46: mod_base = OTHER; note = 2'-fluoro-guanine
  modified_base 47: mod_base = OTHER; note = 2'-fluoro-uracil
  modified_base 48: mod_base = OTHER; note = 2'-fluoro-uracil
  modified_base 56: mod_base = cm
  modified_base 59: mod_base = gm
  modified_base 61: mod_base = cm
  modified_base 62: mod_base = cm
  modified_base 63: mod_base = OTHER; note = 2'-fluoro-cytosine
  modified_base 64: mod_base = gm
  modified_base 65: mod_base = gm
  modified_base 66: mod_base = cm
  modified_base 67: mod_base = gm
  modified_base 68: mod_base = gm
  modified_base 73: mod_base = gm

SEQ ID NO: 1149 - RNA, 76 nt, synthetic construct; identical to SEQ ID NO: 799
  misc_feature 1..76: note = Description of sequence: tRNA-based effector molecule
  source 1..76: mol_type = other RNA

SEQ ID NO: 1150 - RNA, 76 nt, synthetic construct; identical to SEQ ID NO: 802
  misc_feature 1..76: note = Description of sequence: tRNA-based effector molecule
  source 1..76: mol_type = other RNA

SEQ ID NO: 1151 - RNA, 76 nt, synthetic construct; identical to SEQ ID NO: 805
  misc_feature 1..76: note = Description of sequence: tRNA-based effector molecule
  source 1..76: mol_type = other RNA

SEQ ID NO: 1152-1199 - skipped (48 entries)

SEQ ID NO: 1200 - DNA, 73 bp, synthetic construct; identical to SEQ ID NO: 4
  misc_feature 1..73: note = Description of sequence: Consensus sequence
  source 1..73: mol_type = other DNA

SEQ ID NO: 1201 - DNA, 72 bp, synthetic construct; identical to SEQ ID NO: 17
  misc_feature 1..72: note = Description of sequence: Consensus sequence
  source 1..72: mol_type = other DNA

SEQ ID NO: 1202 - DNA, 72 bp, synthetic construct
  misc_feature 1..72: note = Description of sequence: Consensus sequence
  source 1..72: mol_type = other DNA
gggggtgtagctcagtggtagagcgcatgctttgcatgtatgaggccccgggttcgatccccggcacctcca

SEQ ID NO: 1203 - DNA, 73 bp, synthetic construct; identical to SEQ ID NO: 28
  misc_feature 1..73: note = Description of sequence: Consensus sequence
  source 1..73: mol_type = other DNA

SEQ ID NO: 1204 - DNA, 73 bp, synthetic construct; identical to SEQ ID NO: 30
  misc_feature 1..73: note = Description of sequence: Consensus sequence
  source 1..73: mol_type = other DNA

SEQ ID NO: 1205 - DNA, 73 bp, synthetic construct; identical to SEQ ID NO: 32
  misc_feature 1..73: note = Description of sequence: Consensus sequence
  source 1..73: mol_type = other DNA

SEQ ID NO: 1206 - DNA, 73 bp, synthetic construct
  misc_feature 1..73: note = Description of sequence: Consensus sequence
  source 1..73: mol_type = other DNA
gaccgcgtggcctaatggataaggcgtctgacttcggatcagaagattgagggttcgagtccctccgtggtcg

SEQ ID NO: 1207 - DNA, 74 bp, synthetic construct
  misc_feature 1..74: note = Description of sequence: Consensus sequence
  source 1..74: mol_type = other DNA
  variation 21: note = n is a, c, g, or t
  variation 65: note = n is a, c, g, or t
ggctctgtggcgcaatggatnagcgcattggacttctaattcaaaggttgcgggttcgagtcccnccagagtcg

SEQ ID NO: 1208 - DNA, 75 bp, synthetic construct
  misc_feature 1..75: note = Description of sequence: Consensus sequence
  source 1..75: mol_type = other DNA
  variation 43: note = n is a, c, g, or t
gtctctgtggcgcaatcggttagcgcgttcggctgttaaccgnaaaggttggtggttcgagcccacccagggacg

SEQ ID NO: 1209 - DNA, 72 bp, synthetic construct; identical to SEQ ID NO: 62
  misc_feature 1..72: note = Description of sequence: Consensus sequence
  source 1..72: mol_type = other DNA

SEQ ID NO: 1210 - DNA, 73 bp, synthetic construct
  misc_feature 1..73: note = Description of sequence: Consensus sequence
  source 1..73: mol_type = other DNA
  variation 16: note = n is a, c, g, or t
gggggtatagctcagngggtagagcatttgactgcagatcaagaggtccccggttcaaatccgggtgccccct

SEQ ID NO: 1211 - DNA, 72 bp, synthetic construct
  misc_feature 1..72: note = Description of sequence: Consensus sequence
  source 1..72: mol_type = other DNA
  variation 20: note = n is a, c, g, or t
ggttccatggtgtaatggtnagcactctggactctgaatccagcgatccgagttcaagtctcggtggaacct

SEQ ID NO: 1212 - DNA, 72 bp, synthetic construct; identical to SEQ ID NO: 94
  misc_feature 1..72: note = Description of sequence: Consensus sequence
  source 1..72: mol_type = other DNA

SEQ ID NO: 1213 - DNA, 72 bp, synthetic construct; identical to SEQ ID NO: 98
  misc_feature 1..72: note = Description of sequence: Consensus sequence
  source 1..72: mol_type = other DNA

SEQ ID NO: 1214 - DNA, 72 bp, synthetic construct
  misc_feature 1..72: note = Description of sequence: Consensus sequence
  source 1..72: mol_type = other DNA
  variation 42: note = n is a, c, g, or t
tccctggtggtctagtggctaggattcggcgctttcaccgcngcggcccgggttcgattcccggtcagggaa

SEQ ID NO: 1215 - DNA, 71 bp, synthetic construct
  misc_feature 1..71: note = Description of sequence: Consensus sequence
  source 1..71: mol_type = other DNA
  variation 40: note = n is a, c, g, or t
gcattggtggttcagtggtagaattctcgcctcccacgcnggagacccgggttcgattcccggccaatgca

SEQ ID NO: 1216 - DNA, 71 bp, synthetic construct; identical to SEQ ID NO: 108
  misc_feature 1..71: note = Description of sequence: Consensus sequence
  source 1..71: mol_type = other DNA

SEQ ID NO: 1217 - DNA, 72 bp, synthetic construct; identical to SEQ ID NO: 113
  misc_feature 1..72: note = Description of sequence: Consensus sequence
  source 1..72: mol_type = other DNA

SEQ ID NO: 1218 - DNA, 74 bp, synthetic construct; identical to SEQ ID NO: 122
  misc_feature 1..74: note = Description of sequence: Consensus sequence
  source 1..74: mol_type = other DNA

SEQ ID NO: 1219 - DNA, 74 bp, synthetic construct
  misc_feature 1..74: note = Description of sequence: Consensus sequence
  source 1..74: mol_type = other DNA
gctccagtggcgcaatcggttagcgcgcggtacttataatgccgaggttgtgagttcgagcctcacctggagca

SEQ ID NO: 1220 - DNA, 82 bp, synthetic construct; identical to SEQ ID NO: 134
  misc_feature 1..82: note = Description of sequence: Consensus sequence
  source 1..82: mol_type = other DNA

SEQ ID NO: 1221 - DNA, 85 bp, synthetic construct
  misc_feature 1..85: note = Description of sequence: Consensus sequence
  source 1..85: mol_type = other DNA
  variation 21: note = n is a, c, g, or t
  variation 52: note = n is a, c, g, or t
gtcaggatggccgagtggtcntaaggcgccagactcaagttctggtctccgnatggaggcgtgggttcgaatcccacttctgaca

SEQ ID NO: 1222 - DNA, 83 bp, synthetic construct; identical to SEQ ID NO: 144
  misc_feature 1..83: note = Description of sequence: Consensus sequence
  source 1..83: mol_type = other DNA

SEQ ID NO: 1223 - DNA, 83 bp, synthetic construct
  misc_feature 1..83: note = Description of sequence: Consensus sequence
  source 1..83: mol_type = other DNA
accaggatggccgagtggttaaggcgttggacttaagatccaatggacagatgtccgcgtgggttcgaaccccactcctggta

SEQ ID NO: 1224 - DNA, 82 bp, synthetic construct
  misc_feature 1..82: note = Description of sequence: Consensus sequence
  source 1..82: mol_type = other DNA
  variation 54: note = n is a, c, g, or t
ggtagcgtggccgagcggtctaaggcgctggatttaggctccagtctcttcggnggcgtgggttcgaatcccaccgctgcca

SEQ ID NO: 1225 - DNA, 76 bp, synthetic construct
  misc_feature 1..76: note = Description of sequence: Consensus sequence
  source 1..76: mol_type = other DNA
  variation 74: note = n is a, c, g, or t
  variation 75: note = n is a, c, g, or t
  variation 76: note = n is a, c, g, or t
gcccggctagctcagtcggtagagcatgagactcttaatctcagggtcgtgggttcgagccccacgttgggcgnnn

SEQ ID NO: 1226 - DNA, 73 bp, synthetic construct; identical to SEQ ID NO: 167
  misc_feature 1..73: note = Description of sequence: Consensus sequence
  source 1..73: mol_type = other DNA

SEQ ID NO: 1227 - DNA, 73 bp, synthetic construct
  misc_feature 1..73: note = Description of sequence: Consensus sequence
  source 1..73: mol_type = other DNA
  variation 17: note = n is a, c, g, or t
gccctcttagcgcagtnggcagcgcgtcagtctcataatctgaaggtcctgagttcgagcctcagagagggca

SEQ ID NO: 1228 - DNA, 74 bp, synthetic construct
  misc_feature 1..74: note = Description of sequence: Consensus sequence
  source 1..74: mol_type = other DNA
  variation 41: note = n is a, c, g, or t
gccgaaatagctcagttgggagagcgttagactgaagatcntaaaggtccctggttcaatcccgggtttcggca

SEQ ID NO: 1229 - DNA, 72 bp, synthetic construct; identical to SEQ ID NO: 183
  misc_feature 1..72: note = Description of sequence: Consensus sequence
  source 1..72: mol_type = other DNA

SEQ ID NO: 1230 - DNA, 72 bp, synthetic construct; identical to SEQ ID NO: 185
  misc_feature 1..72: note = Description of sequence: Consensus sequence
  source 1..72: mol_type = other DNA

SEQ ID NO: 1231 - DNA, 72 bp, synthetic construct; identical to SEQ ID NO: 189
  misc_feature 1..72: note = Description of sequence: Consensus sequence
  source 1..72: mol_type = other DNA

SEQ ID NO: 1232 - DNA, 82 bp, synthetic construct; identical to SEQ ID NO: 192
  misc_feature 1..82: note = Description of sequence: Consensus sequence
  source 1..82: mol_type = other DNA

SEQ ID NO: 1233 - DNA, 82 bp, synthetic construct; identical to SEQ ID NO: 196
  misc_feature 1..82: note = Description of sequence: Consensus sequence
  source 1..82: mol_type = other DNA

SEQ ID NO: 1234 - DNA, 84 bp, synthetic construct
  misc_feature 1..84: note = Description of sequence: Consensus sequence
  source 1..84: mol_type = other DNA
  variation 8: note = n is a, c, g, or t
  variation 9: note = n is a, c, g, or t
gacgaggnntggccgagtggttaaggcgatggactgctaatccattgtgctctgcacgcgtgggttcgaatcccatcctcgtcg

SEQ ID NO: 1235 - DNA, 82 bp, synthetic construct
  misc_feature 1..82: note = Description of sequence: Consensus sequence
  source 1..82: mol_type = other DNA
gtagtcgtggccgagtggttaaggcgatggacttgaaatccattggggtctccccgcgcaggttcgaatcctgccggctacg

SEQ ID NO: 1236 - DNA, 74 bp, synthetic construct; identical to SEQ ID NO: 211
  misc_feature 1..74: note = Description of sequence: Consensus sequence
  source 1..74: mol_type = other DNA

SEQ ID NO: 1237 - DNA, 75 bp, synthetic construct
  misc_feature 1..75: note = Description of sequence: Consensus sequence
  source 1..75: mol_type = other DNA
  variation 4: note = n is a, c, g, or t
  variation 13: note = n is a, c, g, or t
  variation 17: note = n is a, c, g, or t
  variation 20: note = n is a, c, g, or t
  variation 43: note = n is a, c, g, or t
  variation 51: note = n is a, c, g, or t
  variation 67: note = n is a, c, g, or t
  variation 69: note = n is a, c, g, or t
ggcnctgtggctnagtnggntaaagcgccggtctcgtaaaccnggagatcntgggttcgaatcccancngggcct

SEQ ID NO: 1238 - DNA, 74 bp, synthetic construct
  misc_feature 1..74: note = Description of sequence: Consensus sequence
  source 1..74: mol_type = other DNA
  variation 16: note = n is a, c, g, or t
ggctccatagctcagngggttagagcactggtcttgtaaaccaggggtcgcgagttcaaatctcgctggggcct

SEQ ID NO: 1239 - DNA, 72 bp, synthetic construct; identical to SEQ ID NO: 229
  misc_feature 1..72: note = Description of sequence: Consensus sequence
  source 1..72: mol_type = other DNA

SEQ ID NO: 1240 - DNA, 73 bp, synthetic construct
  misc_feature 1..73: note = Description of sequence: Consensus sequence
  source 1..73: mol_type = other DNA
ccttcgatagctcagctggtagagcggaggactgtagatccttaggtcgctggttcgattccggctcgaagga

SEQ ID NO: 1241 - DNA, 73 bp, synthetic construct; identical to SEQ ID NO: 246
  misc_feature 1..73: note = Description of sequence: Consensus sequence
  source 1..73: mol_type = other DNA

SEQ ID NO: 1242 - DNA, 73 bp, synthetic construct; identical to SEQ ID NO: 252
  misc_feature 1..73: note = Description of sequence: Consensus sequence
  source 1..73: mol_type = other DNA

SEQ ID NO: 1243 - DNA, 73 bp, synthetic construct; identical to SEQ ID NO: 258
  misc_feature 1..73: note = Description of sequence: Consensus sequence
  source 1..73: mol_type = other DNA

SEQ ID NO: 1244 - DNA, 72 bp, synthetic construct; identical to SEQ ID NO: 262
  misc_feature 1..72: note = Description of sequence: Consensus sequence
  source 1..72: mol_type = other DNA

SEQ ID NO: 1245 - DNA, 76 bp, synthetic construct
  misc_feature 1..76: note = Description of sequence: Consensus sequence
  source 1..76: mol_type = other DNA
  variation 74: note = n is a, c, g, or t
  variation 75: note = n is a, c, g, or t
  variation 76: note = n is a, c, g, or t
ggggaattagctcaagtggtagagcgcttgcttagcatgcaagaggtagtgggatcgatgcccacattctccannn

SEQ ID NO: 1246 - DNA, 75 bp, synthetic construct
  misc_feature 1..75: note = Description of sequence: Consensus sequence
  source 1..75: mol_type = other DNA
  variation 73: note = n is a, c, g, or t
  variation 74: note = n is a, c, g, or t
  variation 75: note = n is a, c, g, or t
ggggatgtagctcagtggtagagcgcatgcttcgcatgtatgaggtcccgggttcgatccccggcatctccannn

SEQ ID NO: 1247 - DNA, 75 bp, synthetic construct
  misc_feature 1..75: note = Description of sequence: Consensus sequence
  source 1..75: mol_type = other DNA
  variation 73: note = n is a, c, g, or t
  variation 74: note = n is a, c, g, or t
  variation 75: note = n is a, c, g, or t
gggggtgtagctcagtggtagagcgcatgctttgcatgtatgaggccccgggttcgatccccggcacctccannn

SEQ ID NO: 1248 - DNA, 76 bp, synthetic construct
  misc_feature 1..76: note = Description of sequence: Consensus sequence
  source 1..76: mol_type = other DNA
  variation 74: note = n is a, c, g, or t
  variation 75: note = n is a, c, g, or t
  variation 76: note = n is a, c, g, or t
gggccagtggcgcaatggataacgcgtctgactacggatcagaagattccaggttcgactcctggctggctcgnnn

SEQ ID NO: 1249 - DNA, 76 bp, synthetic construct
  misc_feature 1..76: note = Description of sequence: Consensus sequence
  source 1..76: mol_type = other DNA
  variation 74: note = n is a, c, g, or t
  variation 75: note = n is a, c, g, or t
  variation 76: note = n is a, c, g, or t
ggccgcgtggcctaatggataaggcgtctgattccggatcagaagattgagggttcgagtcccttcgtggtcgnnn

SEQ ID NO: 1250 - DNA, 76 bp, synthetic construct
  misc_feature 1..76: note = Description of sequence: Consensus sequence
  source 1..76: mol_type = other DNA
  variation 74: note = n is a, c, g, or t
  variation 75: note = n is a, c, g, or t
  variation 76: note = n is a, c, g, or t
gccccagtggcctaatggataaggcactggcctcctaagccagggattgtgggttcgagtcccacctggggtannn

SEQ ID NO: 1251 - DNA, 76 bp, synthetic construct
  misc_feature 1..76: note = Description of sequence: Consensus sequence
  source 1..76: mol_type = other DNA
  variation 74: note = n is a, c, g, or t
  variation 75: note = n is a, c, g, or t
  variation 76: note = n is a, c, g, or t
gaccgcgtggcctaatggataaggcgtctgacttcggatcagaagattgagggttcgagtccctccgtggtcgnnn

SEQ ID NO: 1252 - DNA, 77 bp, synthetic construct
  misc_feature 1..77: note = Description of sequence: Consensus sequence
  source 1..77: mol_type = other DNA
  variation 21: note = n is a, c, g, or t
  variation 65: note = n is a, c, g, or t
  variation 75: note = n is a, c, g, or t
  variation 76: note = n is a, c, g, or t
  variation 77: note = n is a, c, g, or t
ggctctgtggcgcaatggatnagcgcattggacttctaattcaaaggttgcgggttcgagtcccnccagagtcgnnn

SEQ ID NO: 1253 - DNA, 78 bp, synthetic construct
  misc_feature 1..78: note = Description of sequence: Consensus sequence
  source 1..78: mol_type = other DNA
  variation 43: note = n is a, c, g, or t
  variation 76: note = n is a, c, g, or t
  variation 77: note = n is a, c, g, or t
  variation 78: note = n is a, c, g, or t
gtctctgtggcgcaatcggttagcgcgttcggctgttaaccgnaaaggttggtggttcgagcccacccagggacgnnn

SEQ ID NO: 1254 - DNA, 75 bp, synthetic construct
  misc_feature 1..75: note = Description of sequence: Consensus sequence
  source 1..75: mol_type = other DNA
  variation 73: note = n is a, c, g, or t
  variation 74: note = n is a, c, g, or t
  variation 75: note = n is a, c, g, or t
tcctcgttagtatagtggtgagtatccccgcctgtcacgcgggagaccggggttcgattccccgacggggagnnn

SEQ ID NO: 1255 - DNA, 76 bp, synthetic construct
  misc_feature 1..76: note = Description of sequence: Consensus sequence
  source 1..76: mol_type = other DNA
  variation 16: note = n is a, c, g, or t
  variation 74: note = n is a, c, g, or t
  variation 75: note = n is a, c, g, or t
  variation 76: note = n is a, c, g, or t
gggggtatagctcagngggtagagcatttgactgcagatcaagaggtccccggttcaaatccgggtgccccctnnn

SEQ ID NO: 1256 - DNA, 75 bp, synthetic construct
  misc_feature 1..75: note = Description of sequence: Consensus sequence
  source 1..75: mol_type = other DNA
  variation 20: note = n is a, c, g, or t
  variation 73: note = n is a, c, g, or t
  variation 74: note = n is a, c, g, or t
  variation 75: note = n is a, c, g, or t
ggttccatggtgtaatggtnagcactctggactctgaatccagcgatccgagttcaagtctcggtggaacctnnn

SEQ ID NO: 1257 - DNA, 75 bp, synthetic construct
  misc_feature 1..75: note = Description of sequence: Consensus sequence
  source 1..75: mol_type = other DNA
  variation 73: note = n is a, c, g, or t
  variation 74: note = n is a, c, g, or t
  variation 75: note = n is a, c, g, or t
ggtcccatggtgtaatggttagcactctggactttgaatccagcgatccgagttcaaatctcggtgggacctnnn

SEQ ID NO: 1258 - DNA, 75 bp, synthetic construct
  misc_feature 1..75: note = Description of sequence: Consensus sequence
  source 1..75: mol_type = other DNA
  variation 73: note = n is a, c, g, or t
  variation 74: note = n is a, c, g, or t
  variation 75: note = n is a, c, g, or t
tccctggtggtctagtggttaggattcggcgctctcaccgccgcggcccgggttcgattcccggtcagggaannn

SEQ ID NO: 1259 - DNA, 75 bp, synthetic construct
  misc_feature 1..75: note = Description of sequence: Consensus sequence
  source 1..75: mol_type = other DNA
  variation 42: note = n is a, c, g, or t
  variation 73: note = n is a, c, g, or t
  variation 74: note = n is a, c, g, or t
  variation 75: note = n is a, c, g, or t
tccctggtggtctagtggctaggattcggcgctttcaccgcngcggcccgggttcgattcccggtcagggaannn

SEQ ID NO: 1260 - DNA, 74 bp, synthetic construct
  misc_feature 1..74: note = Description of sequence: Consensus sequence
  source 1..74: mol_type = other DNA
  variation 40: note = n is a, c, g, or t
  variation 72: note = n is a, c, g, or t
  variation 73: note = n is a, c, g, or t
  variation 74: note = n is a, c, g, or t
gcattggtggttcagtggtagaattctcgcctcccacgcnggagacccgggttcgattcccggccaatgcannn

SEQ ID NO: 1261 - DNA, 74 bp, synthetic construct
  misc_feature 1..74: note = Description of sequence: Consensus sequence
  source 1..74: mol_type = other DNA
  variation 72: note = n is a, c, g, or t
  variation 73: note = n is a, c, g, or t
  variation 74: note = n is a, c, g, or t
gcattggtggttcagtggtagaattctcgcctgccacgcgggaggcccgggttcgattcccggccaatgcannn

SEQ ID NO: 1262 - DNA, 75 bp, synthetic construct
  misc_feature 1..75: note = Description of sequence: Consensus sequence
  source 1..75: mol_type = other DNA
  variation 73: note = n is a, c, g, or t
  variation 74: note = n is a, c, g, or t
  variation 75: note = n is a, c, g, or t
gcgttggtggtatagtggtgagcatagctgccttccaagcagttgacccgggttcgattcccggccaacgcannn

SEQ ID NO: 1263 - DNA, 77 bp, synthetic construct
  misc_feature 1..77: note = Description of sequence: Consensus sequence
  source 1..77: mol_type = other DNA
  variation 75: note = n is a, c, g, or t
  variation 76: note = n is a, c, g, or t
  variation 77: note = n is a, c, g, or t
ggccggttagctcagttggttagagcgtggtgctaataacgccaaggtcgcgggttcgatccccgtacgggccannn

SEQ ID NO: 1264 - DNA, 77 bp, synthetic construct
  misc_feature 1..77: note = Description of sequence: Consensus sequence
  source 1..77: mol_type = other DNA
  variation 75: note = n is a, c, g, or t
  variation 76: note = n is a, c, g, or t
  variation 77: note = n is a, c, g, or t
gctccagtggcgcaatcggttagcgcgcggtacttataatgccgaggttgtgagttcgagcctcacctggagcannn

SEQ ID NO: 1265 - DNA, 85 bp, synthetic construct
  misc_feature 1..85: note = Description of sequence: Consensus sequence
  source 1..85: mol_type = other DNA
  variation 83: note = n is a, c, g, or t
  variation 84: note = n is a, c, g, or t
  variation 85: note = n is a, c, g, or t
ggtagcgtggccgagcggtctaaggcgctggattaaggctccagtctcttcgggggcgtgggttcgaatcccaccgctgccannn

SEQ ID NO: 1266 - DNA, 88 bp, synthetic construct
  misc_feature 1..88: note = Description of sequence: Consensus sequence
  source 1..88: mol_type = other DNA
  variation 21: note = n is a, c, g, or t
  variation 52: note = n is a, c, g, or t
  variation 86: note = n is a, c, g, or t
  variation 87: note = n is a, c, g, or t
  variation 88: note = n is a, c, g, or t
gtcaggatggccgagtggtcntaaggcgccagactcaagttctggtctccgnatggaggcgtgggttcgaatcccacttctgacannn

SEQ ID NO: 1267 - DNA, 86 bp, synthetic construct
  misc_feature 1..86: note = Description of sequence: Consensus sequence
  source 1..86: mol_type = other DNA
  variation 84: note = n is a, c, g, or t
  variation 85: note = n is a, c, g, or t
  variation 86: note = n is a, c, g, or t
gtcaggatggccgagcggtctaaggcgctgcgttcaggtcgcagtctcccctggaggcgtgggttcgaatcccactcctgacannn

SEQ ID NO: 1268 - DNA, 86 bp, synthetic construct
  misc_feature 1..86: note = Description of sequence: Consensus sequence
  source 1..86: mol_type = other DNA
  variation 84: note = n is a, c, g, or t
  variation 85: note = n is a, c, g, or t
  variation 86: note = n is a, c, g, or t
accaggatggccgagtggttaaggcgttggacttaagatccaatggacagatgtccgcgtgggttcgaaccccactcctggtannn

SEQ ID NO: 1269 - DNA, 85 bp, synthetic construct
  misc_feature 1..85: note = Description of sequence: Consensus sequence
  source 1..85: mol_type = other DNA
  variation 54: note = n is a, c, g, or t
  variation 83: note = n is a, c, g, or t
  variation 84: note = n is a, c, g, or t
  variation 85: note = n is a, c, g, or t
ggtagcgtggccgagcggtctaaggcgctggatttaggctccagtctcttcggnggcgtgggttcgaatcccaccgctgccannn

SEQ ID NO: 1270 - DNA, 79 bp, synthetic construct
  misc_feature 1..79: note = Description of sequence: Consensus sequence
  source 1..79: mol_type = other DNA
  variation 74: note = n is a, c, g, or t
  variation 75: note = n is a, c, g, or t
  variation 76: note = n is a, c, g, or t
  variation 77: note = n is a, c, g, or t
  variation 78: note = n is a, c, g, or t
  variation 79: note = n is a, c, g, or t
gcccggctagctcagtcggtagagcatgagactcttaatctcagggtcgtgggttcgagccccacgttgggcgnnnnnn

SEQ ID NO: 1271 - DNA, 76 bp, synthetic construct
  misc_feature 1..76: note = Description of sequence: Consensus sequence
  source 1..76: mol_type = other DNA
  variation 74: note = n is a, c, g, or t
  variation 75: note = n is a, c, g, or t
  variation 76: note = n is a, c, g, or t
gcctggatagctcagtcggtagagcatcagacttttaatctgagggtccagggttcaagtccctgttcaggcgnnn

SEQ ID NO: 1272 - DNA, 76 bp, synthetic construct
  misc_feature 1..76: note = Description of sequence: Consensus sequence
  source 1..76: mol_type = other DNA
  variation 17: note = n is a, c, g, or t
  variation 74: note = n is a, c, g, or t
  variation 75: note = n is a, c, g, or t
  variation 76: note = n is a, c, g, or t
gccctcttagcgcagtnggcagcgcgtcagtctcataatctgaaggtcctgagttcgagcctcagagagggcannn

SEQ ID NO: 1273 - DNA, 77 bp, synthetic construct
  misc_feature 1..77: note = Description of sequence: Consensus sequence
  source 1..77: mol_type = other DNA
  variation 41: note = n is a, c, g, or t
  variation 75: note = n is a, c, g, or t
  variation 76: note = n is a, c, g, or t
  variation 77: note = n is a, c, g, or t
gccgaaatagctcagttgggagagcgttagactgaagatcntaaaggtccctggttcaatcccgggtttcggcannn

SEQ ID NO: 1274 - DNA, 75 bp, synthetic construct
  misc_feature 1..75: note = Description of sequence: Consensus sequence
  source 1..75: mol_type = other DNA
  variation 73: note = n is a, c, g, or t
  variation 74: note = n is a, c, g, or t
  variation 75: note = n is a, c, g, or t
ggctcgttggtctaggggtatgattctcgcttaggatgcgagaggtcccgggttcaaatcccggacgagcccnnn

SEQ ID NO: 1275 - DNA, 75 bp, synthetic construct
  misc_feature 1..75: note = Description of sequence: Consensus sequence
  source 1..75: mol_type = other DNA
  variation 73: note = n is a, c, g, or t
  variation 74: note = n is a, c, g, or t
  variation 75: note = n is a, c, g, or t
ggctcgttggtctaggggtatgattctcgcttcgggtgcgagaggtcccgggttcaaatcccggacgagcccnnn

SEQ ID NO: 1276 - DNA, 75 bp, synthetic construct
  misc_feature 1..75: note = Description of sequence: Consensus sequence
  source 1..75: mol_type = other DNA
  variation 73: note = n is a, c, g, or t
  variation 74: note = n is a, c, g, or t
  variation 75: note = n is a, c, g, or t
ggctcgttggtctaggggtatgattctcgctttgggtgcgagaggtcccgggttcaaatcccggacgagcccnnn

SEQ ID NO: 1277 - DNA, 85 bp, synthetic construct
  misc_feature 1..85: note = Description of sequence: Consensus sequence
  source 1..85: mol_type = other DNA
  variation 83: note = n is a, c, g, or t
  variation 84: note = n is a, c, g, or t
  variation 85: note = n is a, c, g, or t
gtagtcgtggccgagtggttaaggcgatggactagaaatccattggggtttccccgcgcaggttcgaatcctgccgactacgnnn

SEQ ID NO: 1278 - DNA, 85 bp, synthetic construct
  misc_feature 1..85: note = Description of sequence: Consensus sequence
  source 1..85: mol_type = other DNA
  variation 83: note = n is a, c, g, or t
  variation 84: note = n is a, c, g, or t
  variation 85: note = n is a, c, g, or t
gctgtgatggccgagtggttaaggcgttggactcgaaatccaatggggtctccccgcgcaggttcgaatcctgctcacagcgnnn

SEQ ID NO: 1279 - DNA, 87 bp, synthetic construct
  misc_feature 1..87: note = Description of sequence: Consensus sequence
  source 1..87: mol_type = other DNA
  variation 8: note = n is a, c, g, or t
  variation 9: note = n is a, c, g, or t
  variation 85: note = n is a, c, g, or t
  variation 86: note = n is a, c, g, or t
  variation 87: note = n is a, c, g, or t
gacgaggnntggccgagtggttaaggcgatggactgctaatccattgtgctctgcacgcgtgggttcgaatcccatcctcgtcgnnn

SEQ ID NO: 1280 - DNA, 85 bp, synthetic construct
  misc_feature 1..85: note = Description of sequence: Consensus sequence
  source 1..85: mol_type = other DNA
  variation 83: note = n is a, c, g, or t
  variation 84: note = n is a, c, g, or t
  variation 85: note = n is a, c, g, or t
gtagtcgtggccgagtggttaaggcgatggacttgaaatccattggggtctccccgcgcaggttcgaatcctgccggctacgnnn

SEQ ID NO: 1281 - DNA, 77 bp, synthetic construct
  misc_feature 1..77: note = Description of sequence: Consensus sequence
  source 1..77: mol_type = other DNA
  variation 75: note = n is a, c, g, or t
  variation 76: note = n is a, c, g, or t
  variation 77: note = n is a, c, g, or t
ggctccgtggcttagctggttaaagcgcctgtctagtaaacaggagatcctgggttcgaatcccagcggggcctnnn

SEQ ID NO: 1282 - DNA, 78 bp, synthetic construct
  misc_feature 1..78: note = Description of sequence: Consensus sequence
  source 1..78: mol_type = other DNA
  variation 4: note = n is a, c, g, or t
  variation 13: note = n is a, c, g, or t
  variation 17: note = n is a, c, g, or t
  variation 20: note = n is a, c, g, or t
  variation 43: note = n is a, c, g, or t
  variation 51: note = n is a, c, g, or t
  variation 67: note = n is a, c, g, or t
  variation 69: note = n is a, c, g, or t
  variation 76: note = n is a, c, g, or t
  variation 77: note = n is a, c, g, or t
  variation 78: note = n is a, c, g, or t
ggcnctgtggctnagtnggntaaagcgccggtctcgtaaaccnggagatcntgggttcgaatcccancngggcctnnn

SEQ ID NO: 1283 - DNA, 77 bp, synthetic construct
  misc_feature 1..77: note = Description of sequence: Consensus sequence
  source 1..77: mol_type = other DNA
  variation 16: note = n is a, c, g, or t
  variation 75: note = n is a, c, g, or t
  variation 76: note = n is a, c, g, or t
  variation 77: note = n is a, c, g, or t
ggctccatagctcagngggttagagcactggtcttgtaaaccaggggtcgcgagttcaaatctcgctggggcctnnn

SEQ ID NO: 1284 - DNA, 75 bp, synthetic construct
  misc_feature 1..75: note = Description of sequence: Consensus sequence
  source 1..75: mol_type = other DNA
  variation 73: note = n is a, c, g, or t
  variation 74: note = n is a, c, g, or t
  variation 75: note = n is a, c, g, or t
gacctcgtggcgcaacggtagcgcgtctgactccagatcagaaggttgcgtgttcaaatcacgtcggggtcannn

SEQ ID NO: 1285 - DNA, 76 bp, synthetic construct
  misc_feature 1..76: note = Description of sequence: Consensus sequence
  source 1..76: mol_type = other DNA
  variation 74: note = n is a, c, g, or t
  variation 75: note = n is a, c, g, or t
  variation 76: note = n is a, c, g, or t
ccttcgatagctcagctggtagagcggaggactgtagatccttaggtcgctggttcgattccggctcgaaggannn

SEQ ID NO: 1286 - DNA, 76 bp, synthetic construct
  misc_feature 1..76: note = Description of sequence: Consensus sequence
  source 1..76: mol_type = other DNA
  variation 74: note = n is a, c, g, or t
  variation 75: note = n is a, c, g, or t
  variation 76: note = n is a, c, g, or t
gtttccgtagtgtagtggttatcacgttcgcctaacacgcgaaaggtccccggttcgaaaccgggcggaaacannn

SEQ ID NO: 1287 - DNA, 76 bp, synthetic construct
  misc_feature 1..76: note = Description of sequence: Consensus sequence
  source 1..76: mol_type = other DNA
  variation 74: note = n is a, c, g, or t
  variation 75: note = n is a, c, g, or t
  variation 76: note = n is a, c, g, or t
gtttccgtagtgtagtggttatcacgttcgcctcacacgcgaaaggtccccggttcgaaaccgggcggaaacannn

SEQ ID NO: 1288 - DNA, 76 bp, synthetic construct
  misc_feature 1..76: note = Description of sequence: Consensus sequence
  source 1..76: mol_type = other DNA
  variation 74: note = n is a, c, g, or t
  variation 75: note = n is a, c, g, or t
  variation 76: note = n is a, c, g, or t
ggttccatagtgtagtggttatcacgtctgctttacacgcagaaggtcctgggttcgagccccagtggaaccannn

SEQ ID NO: 1289 - DNA, 75 bp, synthetic construct
  misc_feature 1..75: note = Description of sequence: Consensus sequence
  source 1..75: mol_type = other DNA
  variation 73: note = n is a, c, g, or t
  variation 74: note = n is a, c, g, or t
  variation 75: note = n is a, c, g, or t
agcagagtggcgcagcggaagcgtgctgggcccataacccagaggtcgatggatcgaaaccatcctctgctannn

SEQ ID NO: 1290 - RNA, 76 nt, synthetic construct
  misc_feature 1..76: note = Description of sequence: tRNA-based effector molecule
  source 1..76: mol_type = other RNA
gtcccacatggtctagcggttaggattcctggctctaaactaggcggcccgggttcgactcccggtgtgggagcca

SEQ ID NO: 1291 - RNA, 76 nt, synthetic construct
  misc_feature 1..76: note = Description of sequence: tRNA-based effector molecule
  source 1..76: mol_type = other RNA
gtcccacatggtctagcggttaggatgcctggctctaaaccaggcggctcgggttcgactcccggtgtgggaacca

SEQ ID NO: 1292 - RNA, 76 nt, synthetic construct
  misc_feature 1..76: note = Description of sequence: tRNA-based effector molecule
  source 1..76: mol_type = other RNA
gtcccacatggtcgagcggttacgattcctggctccaaaccaggcggcccgggttcgactcccggtgtgggaacca

SEQ ID NO: 1293 - RNA, 76 nt, synthetic construct
  misc_feature 1..76: note = Description of sequence: tRNA-based effector molecule
  source 1..76: mol_type = other RNA
gtcccacatggtctagcggttaggattcctggttctaaactaggcggccggggttcgactcccggtgtgggaacca

SEQ ID NO: 1294 - RNA, 76 nt, synthetic construct
  misc_feature 1..76: note = Description of sequence: tRNA-based effector molecule
  source 1..76: mol_type = other RNA
gtcccacttggtctagcggttaggattcctggctctaaaccaggcggcccgggttcgactcccggagtgggaacca

SEQ ID NO: 1295 - RNA, 76 nt, synthetic construct
  misc_feature 1..76: note = Description of sequence: tRNA-based effector molecule
  source 1..76: mol_type = other RNA
gtcccacatggtctagcggttatgattcctggctctaaaccaggcggcccgggttcgactcccggtgtgggagcca

SEQ ID NO: 1296 - RNA, 76 nt, synthetic construct
  misc_feature 1..76: note = Description of sequence: tRNA-based effector molecule
  source 1..76: mol_type = other RNA
gacccacatggtgtagcggttagcattcctggctctaaaccaggcggcccgggttcgactcccggtgtgggaacca

SEQ ID NO: 1297 - RNA, 76 nt, synthetic construct
  misc_feature 1..76: note = Description of sequence: tRNA-based effector molecule
  source 1..76: mol_type = other RNA
gtcccacatggtctagcggttaggattctaggctctaaacctggcggcccgggttcgactcccggtgtgggaacca

SEQ ID NO: 1298 - RNA, 76 nt, synthetic construct
  misc_feature 1..76: note = Description of sequence: tRNA-based effector molecule
  source 1..76: mol_type = other RNA
gtcgcacatggtctagcggttaggattcgtggctctaaaccacgcggcccgggttcgactcccggtgtgcgaacca

SEQ ID NO: 1299 - RNA, 76 nt, synthetic construct
  misc_feature 1..76: note = Description of sequence: tRNA-based effector molecule
  source 1..76: mol_type = other RNA
gtcccacatggtctagcggttaggattcctggctctaacccaggcggcccgcgttcgactcgcggtgtgggaacca

SEQ ID NO: 1300 - RNA, 75 nt, synthetic construct
  misc_feature 1..75: note = Description of sequence: tRNA-based effector molecule
  source 1..75: mol_type = other RNA
gcgcacatggtctagcggttaggattcctggctctaaaccaggcggcccgggttcgactcccggtgtgcgcacca

SEQ ID NO: 1301 - RNA, 76 nt, synthetic construct
  misc_feature 1..76: note = Description of sequence: tRNA-based effector molecule
  source 1..76: mol_type = other RNA
gtcccacatggtctagcggttaggattccgcgctctaaacgcggcggcccgggttcgactcccggtgtgggaacca

SEQ ID NO: 1302 - RNA, 76 nt, synthetic construct
  misc_feature 1..76: note = Description of sequence: tRNA-based effector molecule
  source 1..76: mol_type = other RNA
gtcccacatggtctagcggttaggtttcctggctctaaaccaggcgacccgggttcgactcccggtgtgggaacca

SEQ ID NO: 1303 - RNA, 76 nt, synthetic construct
  misc_feature 1..76: note = Description of sequence: tRNA-based effector molecule
  source 1..76: mol_type = other RNA
gtccctcatggtctagcggttaggattcctggttctaacccaggcggcacgggttcgactcccgttgtgggaacca

SEQ ID NO: 1304 - RNA, 76 nt, synthetic construct
  misc_feature 1..76: note = Description of sequence: tRNA-based effector molecule
  source 1..76: mol_type = other RNA
gtcccacatggtctaacggttaggattccttgctctaaacaaggcggcccgggttcgactcccggtgtgggaacca

SEQ ID NO: 1305 - RNA, 76 nt, synthetic construct
  misc_feature 1..76: note = Description of sequence: tRNA-based effector molecule
  source 1..76: mol_type = other RNA
gtcccacatggtgtagcggttagcattcctggctctaaaccaggcggcccgggttcgacacccggtgtgggaacca

SEQ ID NO: 1306 - RNA, 76 nt, synthetic construct
  misc_feature 1..76: note = Description of sequence: tRNA-based effector molecule
  source 1..76: mol_type = other RNA
gtcccacttggtctagcggttaggattcctggctctaaaccaggcggcccgggttcgacgcccggagtgggaacca

SEQ ID NO: 1307 - RNA, 76 nt, synthetic construct
  misc_feature 1..76: note = Description of sequence: tRNA-based effector molecule
  source 1..76: mol_type = other RNA
gtccgacatggtctagcggttaggattcctgattctaaaccaggcggcccgggttcgactcccggtgtcggaacca

SEQ ID NO: 1308 - RNA, 76 nt, synthetic construct
  misc_feature 1..76: note = Description of sequence: tRNA-based effector molecule
  source 1..76: mol_type = other RNA
gtcccacatggactagcgtttaggtttcctggctctaaaccaggcggcccgggttcgactcccggtgtgggaacca

SEQ ID NO: 1309 - RNA, 76 nt, synthetic construct
  misc_feature 1..76: note = Description of sequence: tRNA-based effector molecule
  source 1..76: mol_type = other RNA
gtcccacctggtccagcggttaggattcctggctctaaaccaggcggcccgggttcgactcccggtgtgggaacca

SEQ ID NO: 1310 - RNA, 76 nt, synthetic construct
  misc_feature 1..76: note = Description of sequence: tRNA-based effector molecule
  source 1..76: mol_type = other RNA
gtcccacatggtctagcggttaggattgctgtctctaaaacagccggcccgggttcgactcccggtgtgggaacca

SEQ ID NO: 1311 - RNA, 76 nt, synthetic construct
  misc_feature 1..76: note = Description of sequence: tRNA-based effector molecule
  source 1..76: mol_type = other RNA
gtcccacatggtctagcggttaggattcctcgttctaaaccaggcggcccgggttcgacgcccggtgtgggaacca

SEQ ID NO: 1312 - RNA, 76 nt, synthetic construct
  misc_feature 1..76: note = Description of sequence: tRNA-based effector molecule
  source 1..76: mol_type = other RNA
gtcccacgtggtctagcggttaggattcctggctctaaaccaggcggcctgggttcgactcccggcgtgggaacca

SEQ ID NO: 1313 - RNA, 76 nt, synthetic construct
  misc_feature 1..76: note = Description of sequence: tRNA-based effector molecule
  source 1..76: mol_type = other RNA
gtcccacctggtctagcggttaggattgctggctctaaaccagccggcccgggttcgactcccggggtgggaacca

SEQ ID NO: 1314 - RNA, 76 nt, synthetic construct
  misc_feature 1..76: note = Description of sequence: tRNA-based effector molecule
  source 1..76: mol_type = other RNA
gtcccacatggtctaggggttaggattcctggctctaaaccaggcggcacgggttcgactcccgttgtgggaacca

SEQ ID NO: 1315 - RNA, 76 nt, synthetic construct
  misc_feature 1..76: note = Description of sequence: tRNA-based effector molecule
  source 1..76: mol_type = other RNA
gtcccacatggtctagcggttaggattccaggctctaaacctggtggcccgggttcgactcccggtgtgggaacca

SEQ ID NO: 1316 - RNA, 76 nt, synthetic construct
  misc_feature 1..76: note = Description of sequence: tRNA-based effector molecule
  source 1..76: mol_type = other RNA
gtcgcgcatggtctagcggttaggattcctggctctaaaccaggcggcccgggttcgactcccggtgtgcgaacca

SEQ ID NO: 1317 - RNA, 76 nt, synthetic construct
  misc_feature 1..76: note = Description of sequence: tRNA-based effector molecule
  source 1..76: mol_type = other RNA
gtcctgcatggtctagcggttaggattcctggctctaaaccaggcggcccgggttcgactcccggtgcaggaacca

SEQ ID NO: 1318 - RNA, 76 nt, synthetic construct
  misc_feature 1..76: note = Description of sequence: tRNA-based effector molecule
  source 1..76: mol_type = other RNA
gtcccacatggtctagcggttaggattcctgactctaaatcgggcggcccgggttcgactcccggtgtgggaacca

SEQ ID NO: 1319 - RNA, 76 nt, synthetic construct
  misc_feature 1..76: note = Description of sequence: tRNA-based effector molecule
  source 1..76: mol_type = other RNA
gtcccacatggtttagcggttagaattccttgctctaaacaaggcggcccgggttcgactcccggtgtgggaacca

SEQ ID NO: 1320 - RNA, 76 nt, synthetic construct
  misc_feature 1..76: note = Description of sequence: tRNA-based effector molecule
  source 1..76: mol_type = other RNA
gtcccacatagtctagcggttaggattcctagctctaaactaggcggcccgggttcgactcccggtgtgggaacca

SEQ ID NO: 1321 - RNA, 76 nt, synthetic construct
  misc_feature 1..76: note = Description of sequence: tRNA-based effector molecule
  source 1..76: mol_type = other RNA
gtcccacatggtctagcggttaggattcctagctctaaactaggcggcccgggttcgactcccggtctgggaacca

SEQ ID NO: 1322 - RNA, 76 nt, synthetic construct
  misc_feature 1..76: note = Description of sequence: tRNA-based effector molecule
  source 1..76: mol_type = other RNA
gtccgagatggtctagcggttaggattcctggttctaaaccaggcggcccgggttcgactcccggtgtgggaacca

SEQ ID NO: 1323 - RNA, 76 nt, synthetic construct
  misc_feature 1..76: note = Description of sequence: tRNA-based effector molecule
  source 1..76: mol_type = other RNA
gtcctacatggtctagcggttaggattcctggctctaaaccaggcggccggggttcgactccccgtgtaggaacca

SEQ ID NO: 1324 - RNA, 76 nt, synthetic construct
  misc_feature 1..76: note = Description of sequence: tRNA-based effector molecule
  source 1..76: mol_type = other RNA
gtcccacatggtctagcggttaggattcctggtactaacccaggcggcccggtttcgactaccggtgtgggaacca

SEQ ID NO: 1325 - RNA, 76 nt, synthetic construct
  misc_feature 1..76: note = Description of sequence: tRNA-based effector molecule
  source 1..76: mol_type = other RNA
gtcccacatggtctagcggttaggattcctggttctaaaccaggcggttcgggttcgactcccggtgtgggaacca

SEQ ID NO: 1326 - RNA, 75 nt, synthetic construct
  misc_feature 1..75: note = Description of sequence: tRNA-based effector molecule
  source 1..75: mol_type = other RNA
gcccacatggtctagcggttaggattcctggctctaaaccagggggcccgggttcgactcccggtgtgggcacca

SEQ ID NO: 1327 - RNA, 76 nt, synthetic construct
  misc_feature 1..76: note = Description of sequence: tRNA-based effector molecule
  source 1..76: mol_type = other RNA
gtcccacatggtctaacggttaggatgcctggctctaaaccaggcggcccgggttcgactcccggtgtgggaacca

SEQ ID NO: 1328 - RNA, 76 nt, synthetic construct
  misc_feature 1..76: note = Description of sequence: tRNA-based effector molecule
  source 1..76: mol_type = other RNA
gtcccacatggtctagcggttaggatacccggctctaaaccgggcggcccgggttcgactcccggtgtgggaacca

SEQ ID NO: 1329 - RNA, 76 nt, synthetic construct
  misc_feature 1..76: note = Description of sequence: tRNA-based effector molecule
  source 1..76: mol_type = other RNA
gtcccacatggtctagcggttaggattcctcgttctaaaagaggcggcccgggttcgactcccggtgtgggaacca

SEQ ID NO: 1330 - RNA, 76 nt, synthetic construct
  misc_feature 1..76: note = Description of sequence: tRNA-based effector molecule
  source 1..76: mol_type = other RNA
gtaccacatggtgtagcggttaggattcctggttctaaaccaggcggcccgggttcgactcccggtgtgggaacca

SEQ ID NO: 1331 - RNA, 76 nt, synthetic construct
  misc_feature 1..76: note = Description of sequence: tRNA-based effector molecule
  source 1..76: mol_type = other RNA
gtcccacatggtctagcggttaggattcttggttctagaccaagcggcccgggttcgactcccggtgtgggaacca

SEQ ID NO: 1332 - RNA, 76 nt, synthetic construct
  misc_feature 1..76: note = Description of sequence: tRNA-based effector molecule
  source 1..76: mol_type = other RNA
gtcccacatggtctagcggttaggattcgtggctctaaaccacgcggcccgggttcgactcccggtgtgggagcca

SEQ ID NO: 1333 - RNA, 76 nt, synthetic construct
  misc_feature 1..76: note = Description of sequence: tRNA-based effector molecule
  source 1..76: mol_type = other RNA
gtcccacatggtctagcggttaggattcctggctctaaaccaggagccccgggttcgactcccggtgtgggaacca

SEQ ID NO: 1334 - RNA, 77 nt, synthetic construct
  misc_feature 1..77: note = Description of sequence: tRNA-based effector molecule
  source 1..77: mol_type = other RNA
gtcccacatggtctagcggttaggattcctggctctaaaccaaggcggcccgggttcgactcccggtgtgggaacca

SEQ ID NO: 1335 - RNA, 76 nt, synthetic construct
  misc_feature 1..76: note = Description of sequence: tRNA-based effector molecule
  source 1..76: mol_type = other RNA
gtcccacatggtctagcggttaggatccctggctctaaaccaggaggcccgggttcgactcccggtgtgggaacca

SEQ ID NO: 1336 - RNA, 76 nt, synthetic construct
  misc_feature 1..76: note = Description of sequence: tRNA-based effector molecule
  source 1..76: mol_type = other RNA
gtcccgcatggtctagcggttaggattcctggctctaaaccaggcggcacgggttcgactcccgttgcgggaacca

SEQ ID NO: 1337 - RNA, 76 nt, synthetic construct
  misc_feature 1..76: note = Description of sequence: tRNA-based effector molecule
  source 1..76: mol_type = other RNA
gtcccgcatggtctagcggataggattcctggctctaaaccaggcggcccgggttcgactcccggtgcgggaacca

SEQ ID NO: 1338 - RNA, 76 nt, synthetic construct
  misc_feature 1..76: note = Description of sequence: tRNA-based effector molecule
  source 1..76: mol_type = other RNA
gacccacctggtctagcggttaggattcctggctctaaaccaggcggcccgggttcgactcccggggtgggtacca

SEQ ID NO: 1339 - RNA, 76 nt, synthetic construct
  misc_feature 1..76: note = Description of sequence: tRNA-based effector molecule
  source 1..76: mol_type = other RNA
gtcccacttggtctagcggttaggattcctggctctaaaccaggcggccggggttcgactccccgagtgggaacca

SEQ ID NO: 1340 - RNA, 76 nt, synthetic construct
  misc_feature 1..76: note = Description of sequence: tRNA-based effector molecule
  source 1..76: mol_type = other RNA
gtcccacatggtttagcggttagaattcctggctctaaaccaggaggcccgggttcgactcccggtgtgggaacca

SEQ ID NO: 1341 - RNA, 76 nt, synthetic construct
  misc_feature 1..76: note = Description of sequence: tRNA-based effector molecule
  source 1..76: mol_type = other RNA
gttccacatggtctagcggttaggattcctggctctaaactaggcggcccgggttcgactcccggtgtggaaacca

SEQ ID NO: 1342 - RNA, 76 nt, synthetic construct
  misc_feature 1..76: note = Description of sequence: tRNA-based effector molecule
  source 1..76: mol_type = other RNA
gtcccacatggtctagcggttaggattcctggctctaaaccaggcgggccgggttcgattcccggtgtgggaacca

SEQ ID NO: 1343 - RNA, 76 nt, synthetic construct
  misc_feature 1..76: note = Description of sequence: tRNA-based effector molecule
  source 1..76: mol_type = other RNA
gtcccacatggtctagaggttacgattcctggctctaaaccaggcggcccgggttcgactcccggtgtgggaacca

SEQ ID NO: 1344 - RNA, 76 nt, synthetic construct
  misc_feature 1..76: note = Description of sequence: tRNA-based effector molecule
  source 1..76: mol_type = other RNA
gtcccacatggtctagcggttaggattcctgtctctaaaacaggcggccggggttcgactccccgtgtgggaacca

SEQ ID NO: 1345 - RNA, 76 nt, synthetic construct
  misc_feature 1..76: note = Description of sequence: tRNA-based effector molecule
  source 1..76: mol_type = other RNA
gtctcacatggtctagcggttaggattcctgactctaaatcaggcggcccgggttcgactcccggtgtgggaacca

SEQ ID NO: 1346 - RNA, 76 nt, synthetic construct
  misc_feature 1..76: note = Description of sequence: tRNA-based effector molecule
  source 1..76: mol_type = other RNA
gtcccacatggtccagcggttaggattcctggctctaaaccaggcggcgcgggttcgactcccgctgtgggaacca

SEQ ID NO: 1347 - RNA, 76 nt, synthetic construct
  misc_feature 1..76: note = Description of sequence: tRNA-based effector molecule
  source 1..76: mol_type = other RNA
gtcccacatggtctagcggttaggattcctggctctagaccagggggcccgggttcgactcccggtgtgggaacca

SEQ ID NO: 1348 - RNA, 76 nt, synthetic construct
  misc_feature 1..76: note = Description of sequence: tRNA-based effector molecule
  source 1..76: mol_type = other RNA
gtcccacctggtctagcggttaggattcctggttctaacccaggcggcccgggttcgactcccagggtgggaacca

SEQ ID NO: 1349 - RNA, 76 nt, synthetic construct
  misc_feature 1..76: note = Description of sequence: tRNA-based effector molecule
  source 1..76: mol_type = other RNA
gtcccagatggtctagcggttaggattcctgactctaaatcaggcggcccgggttcgactcccggtctgggaacca

SEQ ID NO: 1350 - RNA, 76 nt, synthetic construct
  misc_feature 1..76: note = Description of sequence: tRNA-based effector molecule
  source 1..76: mol_type = other RNA
gtcccacttggtctagcggttaggattcctcgctctaaacgaggcggcccgggttcgactcccggagtgggaacca

SEQ ID NO: 1351 - RNA, 76 nt, synthetic construct
  misc_feature 1..76: note = Description of sequence: tRNA-based effector molecule
  source 1..76: mol_type = other RNA
gtcccacatggactagcggttgggtttcctggttctaaaccaggcggcccgggttcgactcccggtgtgggaacca

SEQ ID NO: 1352 - RNA, 76 nt, synthetic construct
  misc_feature 1..76: note = Description of sequence: tRNA-based effector molecule
  source 1..76: mol_type = other RNA
gtcccacatggtctagcggttaggatgcctggctctaaaccgggcggcccgggttcgactcccggtgtgggaacca

SEQ ID NO: 1353 - RNA, 76 nt, synthetic construct
  misc_feature 1..76: note = Description of sequence: tRNA-based effector molecule
  source 1..76: mol_type = other RNA
gtcccacatggtccagcggttaggatgcctggctctaaaccaggcggcccgggttcgactcccggtgtgggaacca

SEQ ID NO: 1354 - RNA, 76 nt, synthetic construct
  misc_feature 1..76: note = Description of sequence: tRNA-based effector molecule
  source 1..76: mol_type = other RNA
gtcccacatggtctaacggttaggattcctcgctctaaacgaggcggcccgggttcgactcccggtgtgggaacca

SEQ ID NO: 1355 - RNA, 76 nt, synthetic construct
  misc_feature 1..76: note = Description of sequence: tRNA-based effector molecule
  source 1..76: mol_type = other RNA
gccccacatggtctagcggttaggattcctggctctaaaccagacggcccgggttcgactcccggtgtggggacca

SEQ ID NO: 1356 - RNA, 76 nt, synthetic construct
  misc_feature 1..76: note = Description of sequence: tRNA-based effector molecule
  source 1..76: mol_type = other RNA
gtcccacatggtctagcggttaggagtcctggctctaaaccatgcggcccgggttcgactcccggtgtgggaacca

SEQ ID NO: 1357 - RNA, 76 nt, synthetic construct
  misc_feature 1..76: note = Description of sequence: tRNA-based effector molecule
  source 1..76: mol_type = other RNA
gtcccacatggtctagcggttatgattcctggctctaaaccaggcggcacgggttcgactcccgttgtgggaacca

SEQ ID NO: 1358 - RNA, 76 nt, synthetic construct
  misc_feature 1..76: note = Description of sequence: tRNA-based effector molecule
  source 1..76: mol_type = other RNA
gtcccacatggtctaggggttaggattcctggttcttaaccaggcggcccgggttcgactcccggtgtgggaacca

SEQ ID NO: 1359 - RNA, 76 nt, synthetic construct
  misc_feature 1..76: note = Description of sequence: tRNA-based effector molecule
  source 1..76: mol_type = other RNA
gtcccacatggtctagcggttaggattcctggttttaaaccaggcggcccgggttcgactcccggtgtgcgaacca

SEQ ID NO: 1360 - RNA, 75 nt, synthetic construct
  misc_feature 1..75: note = Description of sequence: tRNA-based effector molecule
  source 1..75: mol_type = other RNA
gcccacatggtctagcggttaggattcttggctctaaaccaagcggcccgggttcgactcccggtgtgggaacca

SEQ ID NO: 1361 - RNA, 76 nt, synthetic construct
  misc_feature 1..76: note = Description of sequence: tRNA-based effector molecule
  source 1..76: mol_type = other RNA
gtcccacatggtctagcggttaggattcctgcctctaaaccaggcggcccgggttcgactcccgatgtgggaacca

SEQ ID NO: 1362 - RNA, 76 nt, synthetic construct
  misc_feature 1..76: note = Description of sequence: tRNA-based effector molecule
  source 1..76: mol_type = other RNA
gtcccatatggtctagcggttaggattcttggctctaaaccaagcggcccgggttcgactcccggtgtgggaacca

SEQ ID NO: 1363 - RNA, 76 nt, synthetic construct
  misc_feature 1..76: note = Description of sequence: tRNA-based effector molecule
  source 1..76: mol_type = other RNA
gtcccacgtggtctagcggttaggattcctgactctaaatcaggcggcccgggttcgactcccggtgtgggaacca

SEQ ID NO: 1364 - RNA, 76 nt, synthetic construct
  misc_feature 1..76: note = Description of sequence: tRNA-based effector molecule
  source 1..76: mol_type = other RNA
gtcccacatggtctagcggttatgattcctggctctaaaccaggcggcccgagttcgactcccggtgtgggaacca

SEQ ID NO: 1365 - RNA, 76 nt, synthetic construct
  misc_feature 1..76: note = Description of sequence: tRNA-based effector molecule
  source 1..76: mol_type = other RNA
gtcccaaatggtctagcggttaggattccgggctctaaacccggcggcccgggttcgactcccggtttgggaacca

SEQ ID NO: 1366 - RNA, 76 nt, synthetic construct
  misc_feature 1..76: note = Description of sequence: tRNA-based effector molecule
  source 1..76: mol_type = other RNA
gtcccacatggcctagcggttaggcttcctggttctaaaccaggcggcccgggttcgactcccggtgtgggaacca

SEQ ID NO: 1367 - RNA, 78 nt, synthetic construct
  misc_feature 1..78: note = Description of sequence: tRNA-based effector molecule
  source 1..78: mol_type = other RNA
gtcccacatggtcttagcggttacggattcctggctctaaaccaggcggcccgggttcgactcccggtgtgggaacca

SEQ ID NO: 1368 - RNA, 76 nt, synthetic construct
  misc_feature 1..76: note = Description of sequence: tRNA-based effector molecule
  source 1..76: mol_type = other RNA
gtcccacatggtctagcggttcggattcctggctctaaaccaggaggcccgggttcgactcccggtgtgggaacca

SEQ ID NO: 1369 - RNA, 76 nt, synthetic construct
  misc_feature 1..76: note = Description of sequence: tRNA-based effector molecule
  source 1..76: mol_type = other RNA
gtcccacatggtatagcggttagtattcgtggttctaaaccacgcggcccgggttcgactcccggtgtgggaacca

SEQ ID NO: 1370 - RNA, 76 nt, synthetic construct
  misc_feature 1..76: note = Description of sequence: tRNA-based effector molecule
  source 1..76: mol_type = other RNA
gtcgcacatggtctagcggttaggattcctggctctagaccaggcggcccgggttcgactcccggtgtgcgaacca

SEQ ID NO: 1371 - RNA, 76 nt, synthetic construct
  misc_feature 1..76: note = Description of sequence: tRNA-based effector molecule
  source 1..76: mol_type = other RNA
gtcccacatagtctagcggttaagattcctggctctaaaccaggcggcccgggttcgactcccggtgtgggaacca

SEQ ID NO: 1372 - RNA, 76 nt, synthetic construct
  misc_feature 1..76: note = Description of sequence: tRNA-based effector molecule
  source 1..76: mol_type = other RNA
gtcccacgtggtctaacggttaggattcctggctctaaaccaggcggcccgggttcgactcccggtgtgggaacca

SEQ ID NO: 1373 - RNA, 75 nt, synthetic construct
  misc_feature 1..75: note = Description of sequence: tRNA-based effector molecule
  source 1..75: mol_type = other RNA
gcccacatggtctagcggttaggattcctggctctaaaccaggcggcgcgggttcgactcccgctgtgggcacca

SEQ ID NO: 1374 - RNA, 76 nt, synthetic construct
  misc_feature 1..76: note = Description of sequence: tRNA-based effector molecule
  source 1..76: mol_type = other RNA
gtcccccatggtctagcggttaggattcctggctctaaaccaggcggccagggttcgactccctgtgggggaacca

SEQ ID NO: 1375 - RNA, 76 nt, synthetic construct
  misc_feature 1..76: note = Description of sequence: tRNA-based effector molecule
  source 1..76: mol_type = other RNA
gccccacatggtctagcggttaggattcctgattctaaaccaggcggcccgggttcgactcccggtgtggggacca

SEQ ID NO: 1376 - RNA, 76 nt, synthetic construct
  misc_feature 1..76: note = Description of sequence: tRNA-based effector molecule
  source 1..76: mol_type = other RNA
gtcccacatggtctagcggttaggattcctggctctaaaccaggcggcccgggttcgactcccggtgtgggaacca

SEQ ID NO: 1377 - RNA, 76 nt, synthetic construct
  misc_feature 1..76: note = Description of sequence: tRNA-based effector molecule
  source 1..76: mol_type = other RNA
gacccacatggtctagcggttaggatgcctggctctaaaccaggcggcccgggttcgactcccggtgtgggtacca

SEQ ID NO: 1378 - RNA, 75 nt, synthetic construct
  misc_feature 1..75: note = Description of sequence: tRNA-based effector molecule
  source 1..75: mol_type = other RNA
gcccacatggtctagcggttaggattcctggctctaaaccaggcgggccgggttcgactcccggtgtgggcacca

SEQ ID NO: 1379 - RNA, 76 nt, synthetic construct
  misc_feature 1..76: note = Description of sequence: tRNA-based effector molecule
  source 1..76: mol_type = other RNA
gttccacatggtctagcggttaggattcctggctctaaaccaggtggcccgggttcgactcccggtgtggaaacca

SEQ ID NO: 1380 - RNA, 76 nt, synthetic construct
  misc_feature 1..76: note = Description of sequence: tRNA-based effector molecule
  source 1..76: mol_type = other RNA
gtcgcacatggtctagcggttaggatttctggctctaaaccagacggcccgggttcgactcccggtgtgcgaacca

SEQ ID NO: 1381 - RNA, 76 nt, synthetic construct
  misc_feature 1..76: note = Description of sequence: tRNA-based effector molecule
  source 1..76: mol_type = other RNA
gtcgcacatggtctagcggttaggattcctggctctaaaccaggcgacccgggttcgactcccggtgtgcgaacca

SEQ ID NO: 1382 - RNA, 76 nt, synthetic construct
  misc_feature 1..76: note = Description of sequence: tRNA-based effector molecule
  source 1..76: mol_type = other RNA
gtcctacatggtctagcggtaaggattcctggctctaaaccaggcggcccgggttcgactcccggtgtaggaacca

SEQ ID NO: 1383 - RNA, 76 nt, synthetic construct
  misc_feature 1..76: note = Description of sequence: tRNA-based effector molecule
  source 1..76: mol_type = other RNA
gtccagcatggtctagcggttaggattcctggctctaaaccaggcggcccgggttcgactcccggtgttggaacca

SEQ ID NO: 1384 - RNA, 76 nt, synthetic construct
  misc_feature 1..76: note = Description of sequence: tRNA-based effector molecule
  source 1..76: mol_type = other RNA
gtcccgcatggtctagcggttagaattcctggctctaaaccaggcggcccgggttcgactcccggtgcgggaacca

SEQ ID NO: 1385 - RNA, 76 nt, synthetic construct
  misc_feature 1..76: note = Description of sequence: tRNA-based effector molecule
  source 1..76: mol_type = other RNA
gtcccatatggtctagcggttaggatttctggctctaaaccagacggcccgggttcgactcccggtgtgggaacca

SEQ ID NO: 1386 - RNA, 76 nt, synthetic construct
  misc_feature 1..76: note = Description of sequence: tRNA-based effector molecule
  source 1..76: mol_type = other RNA
gtcccatatggtctagcggttaggattcctggctctaaaccaggaggcccgggttcgactcccggtatgggaacca

SEQ ID NO: 1387 - RNA, 76 nt, synthetic construct
  misc_feature 1..76: note = Description of sequence: tRNA-based effector molecule
  source 1..76: mol_type = other RNA
gtcccactttgtctagcggttaggattcctggctctaaaccaggcggcccgggttcgactcccggagtgggaacca

SEQ ID NO: 1388 - RNA, 76 nt, synthetic construct
  misc_feature 1..76: note = Description of sequence: tRNA-based effector molecule
  source 1..76: mol_type = other RNA
gtcccacacggtcaagcggttaggattcctggctctaaaccaggcggcccgggttcgactcccggtgtgggaacca

SEQ ID NO: 1389 - RNA, 76 nt, synthetic construct
  misc_feature 1..76: note = Description of sequence: tRNA-based effector molecule
  source 1..76: mol_type = other RNA
gtcccacaaggtctagcggttaggattccgggttctaaaccaggcggcccgggttcgactcccggtgtgggaacca

SEQ ID NO: 1390 - RNA, 76 nt, synthetic construct
  misc_feature 1..76: note = Description of sequence: tRNA-based effector molecule
  source 1..76: mol_type = other RNA
gtcccacagggtctagcggttaggattcctggttctaaaccaggcggcccgggttcgactcccggggtgggaacca

SEQ ID NO: 1391 - RNA, 76 nt, synthetic construct
  misc_feature 1..76: note = Description of sequence: tRNA-based effector molecule
  source 1..76: mol_type = other RNA
gtcccacatagtctagcggttaggatgcctggctctaaaccaggcggcccgggttcgactcccggtgtgggaacca

SEQ ID NO: 1392 - RNA, 76 nt, synthetic construct
  misc_feature 1..76: note = Description of sequence: tRNA-based effector molecule
  source 1..76: mol_type = other RNA
gtcccacatggtctagcggttaggactccttgctctaaacaaggcggcccgggttcgactcccggtgtgggaacca

SEQ ID NO: 1393 - RNA, 76 nt, synthetic construct
  misc_feature 1..76: note = Description of sequence: tRNA-based effector molecule
  source 1..76: mol_type = other RNA
gtcccacatggtctagcggttaggactcctggctctaaaccaggcggcacgggttcgactcccgttgtgggaacca

SEQ ID NO: 1394 - RNA, 76 nt, synthetic construct
  misc_feature 1..76: note = Description of sequence: tRNA-based effector molecule
  source 1..76: mol_type = other RNA
gtcccacatgggctagcggttatgcttcctggctctaaaccaggcggcccgggttcgactcccggtgtgggaacca

SEQ ID NO: 1395 - RNA, 76 nt, synthetic construct
  misc_feature 1..76: note = Description of sequence: tRNA-based effector molecule
  source 1..76: mol_type = other RNA
gtcccacatggtgtagcggttagcattcctggctctaaaccaggcggcccgggttcgactcccggtgtgggaacca

SEQ ID NO: 1396 - RNA, 76 nt, synthetic construct
  misc_feature 1..76: note = Description of sequence: tRNA-based effector molecule
  source 1..76: mol_type = other RNA
gtcccacatggtctagcggttaagatttctggctctaaaccagacggcccgggttcgactcccggtgtgggaacca

SEQ ID NO: 1397 - RNA, 76 nt, synthetic construct
  misc_feature 1..76: note = Description of sequence: tRNA-based effector molecule
  source 1..76: mol_type = other RNA
gtcccacatggtcgagcggttacgattcctggttctaaacctggcggcccgggttcgactcccggtgtgggaacca

SEQ ID NO: 1398 - RNA, 76 nt, synthetic construct
  misc_feature 1..76: note = Description of sequence: tRNA-based effector molecule
  source 1..76: mol_type = other RNA
gtcccacatggtcaagcggttatgattcctggctctaaaccaggtggcccgggttcgactcccggtgtgggaacca

SEQ ID NO: 1399 - RNA, 76 nt, synthetic construct
  misc_feature 1..76: note = Description of sequence: tRNA-based effector molecule
  source 1..76: mol_type = other RNA
gtcccacatggtcttgcggttaggattcctggctcgaaaccaggcggcccgggttcgactcccggtgtgggaacca

SEQ ID NO: 1400 - RNA, 76 nt, synthetic construct
  misc_feature 1..76: note = Description of sequence: tRNA-based effector molecule
  source 1..76: mol_type = other RNA
gtcccacatggtctaacggttaggattcctgattctaaaccaggcggcccgggttcgactcccggtgtgggaacca

SEQ ID NO: 1401 - RNA, 76 nt, synthetic construct
  misc_feature 1..76: note = Description of sequence: tRNA-based effector molecule
  source 1..76: mol_type = other RNA
gtcccacatggtctagaggttaggatttctggctctaaaccagacggcccgggttcgactcccggtgtgggaacca

SEQ ID NO: 1402 - RNA, 76 nt, synthetic construct
  misc_feature 1..76: note = Description of sequence: tRNA-based effector molecule
  source 1..76: mol_type = other RNA
gtcccacatggtctagccgttaggattcctggttctaaacctggcggcccgggttcgactcccggtgtgggaacca

SEQ ID NO: 1403 - RNA, 76 nt, synthetic construct
  misc_feature 1..76: note = Description of sequence: tRNA-based effector molecule
  source 1..76: mol_type = other RNA
gtcccacatggtctagcgtttaggattcctggttctaaaccatgcggcccgggttcgactcccggtgtgggaacca

SEQ ID NO: 1404 - RNA, 76 nt, synthetic construct
  misc_feature 1..76: note = Description of sequence: tRNA-based effector molecule
  source 1..76: mol_type = other RNA
gtcccacatggtctagcgggtaggattcgtggctctaaaccacgcggcccgggttcgactcccggtgtgggaacca

SEQ ID NO: 1405 - RNA, 76 nt, synthetic construct
  misc_feature 1..76: note = Description of sequence: tRNA-based effector molecule
  source 1..76: mol_type = other RNA
gtcccacatggtctagcggtcaggatttctggctctaaaccagacggcccgggttcgactcccggtgtgggaacca

SEQ ID NO: 1406 - RNA, 76 nt, synthetic construct
  misc_feature 1..76: note = Description of sequence: tRNA-based effector molecule
  source 1..76: mol_type = other RNA
gtcccacatggtctagcggtcaggattcctgattctaaatcaggcggcccgggttcgactcccggtgtgggaacca

SEQ ID NO: 1407 - RNA, 76 nt, synthetic construct
  misc_feature 1..76: note = Description of sequence: tRNA-based effector molecule
  source 1..76: mol_type = other RNA
gtcccacatggtctagcggttagaattactggctctaaaccagtcggcccgggttcgactcccggtgtgggaacca

SEQ ID NO: 1408 - RNA, 76 nt, synthetic construct
  misc_feature 1..76: note = Description of sequence: tRNA-based effector molecule
  source 1..76: mol_type = other RNA
gtcccacatggtctagcggttagggttcctggctctaaaccaggcggccagggttcgactccctgtgtgggaacca

SEQ ID NO: 1409 - RNA, 76 nt, synthetic construct
  misc_feature 1..76: note = Description of sequence: tRNA-based effector molecule
  source 1..76: mol_type = other RNA
gtcccacatggtctagcggttaggataactggctctaaaccagtcggcccgggttcgactcccggtgtgggaacca

SEQ ID NO: 1410 - RNA, 76 nt, synthetic construct
  misc_feature 1..76: note = Description of sequence: tRNA-based effector molecule
  source 1..76: mol_type = other RNA
gtcccacatggtctagcggttaggattgatggctctaaaccatccggcccgggttcgactcccggtgtgggaacca

SEQ ID NO: 1411 - RNA, 76 nt, synthetic construct
  misc_feature 1..76: note = Description of sequence: tRNA-based effector molecule
  source 1..76: mol_type = other RNA
gtcccacatggtctagcggttaggattcgtggctctaaaccactcggcccgggttcgactcccggtgtgggaacca

SEQ ID NO: 1412 - RNA, 76 nt, synthetic construct
  misc_feature 1..76: note = Description of sequence: tRNA-based effector molecule
  source 1..76: mol_type = other RNA
gtcccacatggtctagcggttaggattcgtggctctaaaccacgcggcccgggttcgactcccggtgtgggaacca

SEQ ID NO: 1413 - RNA, 76 nt, synthetic construct
  misc_feature 1..76: note = Description of sequence: tRNA-based effector molecule
  source 1..76: mol_type = other RNA
gtcccacatggtctagcggttaggattcttggctctaaaccaagcggcccgggttcaactcccggtgtgggaacca

SEQ ID NO: 1414 - RNA, 76 nt, synthetic construct
  misc_feature 1..76: note = Description of sequence: tRNA-based effector molecule
  source 1..76: mol_type = other RNA
gtcccacatggtctagcggttaggattcatggctctaaaccatgcggcccgggttcgactcccggtgtgggagcca

SEQ ID NO: 1415 - RNA, 76 nt, synthetic construct
  misc_feature 1..76: note = Description of sequence: tRNA-based effector molecule
  source 1..76: mol_type = other RNA
gtcccacatggtctagcggttaggattccgggctctaaacccgggggcccgggttcgactcccggtgtgggaacca

SEQ ID NO: 1416 - RNA, 76 nt, synthetic construct
  misc_feature 1..76: note = Description of sequence: tRNA-based effector molecule
  source 1..76: mol_type = other RNA
gtcccacatggtctagcggttaggattccggactctaaaccaggcggcccgggttcgactcccggtgtgggaacca

SEQ ID NO: 1417 - RNA, 76 nt, synthetic construct
  misc_feature 1..76: note = Description of sequence: tRNA-based effector molecule
  source 1..76: mol_type = other RNA
gtcccacatggtctagcggttaggattcccgactctaaaccgggcggcccgggttcgactcccggtgtgggaacca

SEQ ID NO: 1418 - RNA, 76 nt, synthetic construct
  misc_feature 1..76: note = Description of sequence: tRNA-based effector molecule
  source 1..76: mol_type = other RNA
gtcccacatggtctagcggttaggattccttgctctaaacaaggcagcccgggttcgactcccggtgtgggaacca

SEQ ID NO: 1419 - RNA, 76 nt, synthetic construct
  misc_feature 1..76: note = Description of sequence: tRNA-based effector molecule
  source 1..76: mol_type = other RNA
gtcccacatggtctagcggttaggattcctcgctctaaacgaggcggcccgggttcgactcccggtgtgggagcca

SEQ ID NO: 1420 - RNA, 76 nt, synthetic construct
  misc_feature 1..76: note = Description of sequence: tRNA-based effector molecule
  source 1..76: mol_type = other RNA
gtcccacatggtctagcggttaggattcctcgctctaaacgaggaggcccgggttcgactcccggtgtgggaacca

SEQ ID NO: 1421 - RNA, 76 nt, synthetic construct
  misc_feature 1..76: note = Description of sequence: tRNA-based effector molecule
  source 1..76: mol_type = other RNA
gtcccacatggtctagcggttaggattcctgactctaaatcaggaggcccgggttcgactcccggtgtgggaacca

SEQ ID NO: 1422 - RNA, 76 nt, synthetic construct
  misc_feature 1..76: note = Description of sequence: tRNA-based effector molecule
  source 1..76: mol_type = other RNA
gtcccacatggtctagcggttaggattcctgtctctaaaacagggggcccgggttcgactcccggtgtgggaacca

SEQ ID NO: 1423 - RNA, 76 nt, synthetic construct
  misc_feature 1..76: note = Description of sequence: tRNA-based effector molecule
  source 1..76: mol_type = other RNA
gtcccacatggtctagcggttaggattcctgcctctaaagcgggcggcccgggttcgactcccggtgtgggaacca

SEQ ID NO: 1424 - RNA, 76 nt, synthetic construct
  misc_feature 1..76: note = Description of sequence: tRNA-based effector molecule
  source 1..76: mol_type = other RNA
gtcccacatggtctagcggttaggattcctgactctaaatcaggcggcccgggttcgactcccggtgtgggagcca

SEQ ID NO: 1425 - RNA, 76 nt, synthetic construct
  misc_feature 1..76: note = Description of sequence: tRNA-based effector molecule
  source 1..76: mol_type = other RNA
gtcccacatggtctagcggttaggattcctggctctaaaccaggaggcccgggttcgactcccggtgtgggaacca

SEQ ID NO: 1426 - RNA, 76 nt, synthetic construct
  misc_feature 1..76: note = Description of sequence: tRNA-based effector molecule
  source 1..76: mol_type = other RNA
gtcccacatggtctagcggttaggattcctggctctaaaccaggcggcctgggttcgactcccggtgtgggaacca

SEQ ID NO: 1427 - RNA, 76 nt, synthetic construct
  misc_feature 1..76: note = Description of sequence: tRNA-based effector molecule
  source 1..76: mol_type = other RNA
gtcccacatggtctagcggttaggattcctggctctaaaccaggcggcccgggttcgactcccggtatgggaacca

SEQ ID NO: 1428 - RNA, 76 nt, synthetic construct
  misc_feature 1..76: note = Description of sequence: tRNA-based effector molecule
  source 1..76: mol_type = other RNA
gtcccacatggtctagcggttaggattcctggctctaacccaggcggcctgggttcgactcccagtgtgggaacca

SEQ ID NO: 1429 - RNA, 76 nt, synthetic construct
  misc_feature 1..76: note = Description of sequence: tRNA-based effector molecule
  source 1..76: mol_type = other RNA
gtcccacatggtctagcggttaggattcctggtcctaaaccatgcggcccgggttcgactcccggtgtgggaacca

SEQ ID NO: 1430 - RNA, 76 nt, synthetic construct
  misc_feature 1..76: note = Description of sequence: tRNA-based effector molecule
  source 1..76: mol_type = other RNA
gtcccacatggtctagcggttaggattcctggttataaaccatgcggcccgggttcgactcccggtgtgggaacca

SEQ ID NO: 1431 - RNA, 76 nt, synthetic construct
  misc_feature 1..76: note = Description of sequence: tRNA-based effector molecule
  source 1..76: mol_type = other RNA
gtcccacatggtctagcggttaggattcctggttttaaaccaggcggcccgggtacgactcccggtgtgggaacca

SEQ ID NO: 1432 - RNA, 76 nt, synthetic construct
  misc_feature 1..76: note = Description of sequence: tRNA-based effector molecule
  source 1..76: mol_type = other RNA
gtcccacatggtctagcggttaggattcctggttcaacaccaggcggcccgggttcgactcccggtgtgggaacca

SEQ ID NO: 1433 - RNA, 76 nt, synthetic construct
  misc_feature 1..76: note = Description of sequence: tRNA-based effector molecule
  source 1..76: mol_type = other RNA
gtcccacatggtctagcggttaggattcctggttcgaaaccaggcggcccgggttcgactcccggtgtgggcacca

SEQ ID NO: 1434 - RNA, 76 nt, synthetic construct
  misc_feature 1..76: note = Description of sequence: tRNA-based effector molecule
  source 1..76: mol_type = other RNA
gtcccacatggtctagcggttaggattcctggttcttaaccaggcggccggggttcgactccccgtgtgggaacca

SEQ ID NO: 1435 - RNA, 76 nt, synthetic construct
  misc_feature 1..76: note = Description of sequence: tRNA-based effector molecule
  source 1..76: mol_type = other RNA
gtcccacatggtctagcggttaggattcctggctctgaaccaggcggcccgggttcgaatcccggtgtgggaacca

SEQ ID NO: 1436 - RNA, 76 nt, synthetic construct
  misc_feature 1..76: note = Description of sequence: tRNA-based effector molecule
  source 1..76: mol_type = other RNA
gtcccacatggtctagcggttaggattcctggctctcaaccaggcggctcgggttcgactcccgatgtgggaacca

SEQ ID NO: 1437 - RNA, 76 nt, synthetic construct
  misc_feature 1..76: note = Description of sequence: tRNA-based effector molecule
  source 1..76: mol_type = other RNA
gtcccacatggtctagcggttaggattcctggctctacaccaggcggcccgggttcgactcccggtgtggcaacca

SEQ ID NO: 1438 - RNA, 76 nt, synthetic construct
  misc_feature 1..76: note = Description of sequence: tRNA-based effector molecule
  source 1..76: mol_type = other RNA
gtcccacatggtctagcggttaggattcctggttctataccaggcggcccaggttcgactcctggtgtgggaacca

SEQ ID NO: 1439 - RNA, 76 nt, synthetic construct
  misc_feature 1..76: note = Description of sequence: tRNA-based effector molecule
  source 1..76: mol_type = other RNA
gtcccacatggtctagcggttaggattcctggttctaaacaaggcggtccgggttcgactcccggtgtgggaacca

SEQ ID NO: 1440 - RNA, 76 nt, synthetic construct
  misc_feature 1..76: note = Description of sequence: tRNA-based effector molecule
  source 1..76: mol_type = other RNA
gtcccacatggtctagcggttaggattcctggctctaaactgggcggcccgggttcgactcccggtgtgggaacca

SEQ ID NO: 1441 - RNA, 76 nt, synthetic construct
  misc_feature 1..76: note = Description of sequence: tRNA-based effector molecule
  source 1..76: mol_type = other RNA
gtcccacatggtctagcggttaggattcctggctctaaaccgggcgccccgggttcgactcccggtgtgggaacca

SEQ ID NO: 1442 - RNA, 77 nt, synthetic construct
  misc_feature 1..77: note = Description of sequence: tRNA-based effector molecule
  source 1..77: mol_type = other RNA
gtcccacatggtctagcggttaggattcctggttctaaaccgaggcggcccgggttcgactcccggtgtgggaacca

SEQ ID NO: 1443 - RNA, 77 nt, synthetic construct
  misc_feature 1..77: note = Description of sequence: tRNA-based effector molecule
  source 1..77: mol_type = other RNA
gtcccacatggtctagcggttaggattcctggctctaaaccacggcggcccgggttcgactcccggtgtgggaacca

SEQ ID NO: 1444 - RNA, 76 nt, synthetic construct
  misc_feature 1..76: note = Description of sequence: tRNA-based effector molecule
  source 1..76: mol_type = other RNA
gtcccacatggtctagcggttaggattcctggctctaaaccagtaggcccgggttcgactcccggtgtgggaacca

SEQ ID NO: 1445 - RNA, 76 nt, synthetic construct
  misc_feature 1..76: note = Description of sequence: tRNA-based effector molecule
  source 1..76: mol_type = other RNA
gtcccacatggtctagcggttaggattcctggctctaaaccaggaggcccgtgttcgactcacggtgtgggaacca

SEQ ID NO: 1446 - RNA, 77 nt, synthetic construct
  misc_feature 1..77: note = Description of sequence: tRNA-based effector molecule
  source 1..77: mol_type = other RNA
gtcccacatggtctagcggttaggattcctggctctaaaccaggcaggcccgggttcgactcccggtgtgggaacca

SEQ ID NO: 1447 - RNA, 76 nt, synthetic construct
  misc_feature 1..76: note = Description of sequence: tRNA-based effector molecule
  source 1..76: mol_type = other RNA
gtcccacatggtctagcggttaggattcctggctctaaaccaggcgacccgggttcgacccccggtgtgggaacca

SEQ ID NO: 1448 - RNA, 76 nt, synthetic construct
  misc_feature 1..76: note = Description of sequence: tRNA-based effector molecule
  source 1..76: mol_type = other RNA
gtcccacatggtctagcggttaggattcctggctctaaaccaggcggtccgggttcgactcccggtgtgggagcca

SEQ ID NO: 1449 - RNA, 76 nt, synthetic construct
  misc_feature 1..76: note = Description of sequence: tRNA-based effector molecule
  source 1..76: mol_type = other RNA
gtcccacatggtctagcggttaggattcctggctctaaaccaggcgggctgggttcgactcccggtgtgggaacca

SEQ ID NO: 1450 - RNA, 76 nt, synthetic construct
  misc_feature 1..76: note = Description of sequence: tRNA-based effector molecule
  source 1..76: mol_type = other RNA
gtcccacatggtctagcggttaggattcctggctctaaaccaggcggcacgggttcgaatcccgttgtgggaacca

SEQ ID NO: 1451 - RNA, 76 nt, synthetic construct
  misc_feature 1..76: note = Description of sequence: tRNA-based effector molecule
  source 1..76: mol_type = other RNA
gtcccacatggtctagcggttaggattcctggctctaaaccaggcggcgcgggttcgactcccgctgtgggagcca

SEQ ID NO: 1452 - RNA, 76 nt, synthetic construct
  misc_feature 1..76: note = Description of sequence: tRNA-based effector molecule
  source 1..76: mol_type = other RNA
gtctcacatgctctagcggttaggattcctggttctaacccaggcggcccgggttcgactcccggtgtgagaacca

SEQ ID NO: 1453 - RNA, 76 nt, synthetic construct
  misc_feature 1..76: note = Description of sequence: tRNA-based effector molecule
  source 1..76: mol_type = other RNA
gtccaacatggtctagcggctaggattcctggttctaaaccaggcggcccgggttcgactcccggtgtgggaacca

SEQ ID NO: 1454 - RNA, 76 nt, synthetic construct
  misc_feature 1..76: note = Description of sequence: tRNA-based effector molecule
  source 1..76: mol_type = other RNA
gtcccacatgttctagcggttaggattcctggttctaaaccaggcggcctgggttcgactcccagtgtgggaacca

SEQ ID NO: 1455 - RNA, 76 nt, synthetic construct
  misc_feature 1..76: note = Description of sequence: tRNA-based effector molecule
  source 1..76: mol_type = other RNA
gtcccacatggtctagcggttaggattcctggttctaacccaggcggcccgggttcgactcccggtgtgggaacca

SEQ ID NO: 1456 - RNA, 76 nt, synthetic construct
  misc_feature 1..76: note = Description of sequence: tRNA-based effector molecule
  source 1..76: mol_type = other RNA
gtcccacatggtctagcggttaggattcctggttctaaaccaggcggcccgggttcgactcccggtgtgggaacca

SEQ ID NO: 1457 - RNA, 76 nt, synthetic construct; identical to SEQ ID NO: 761
  misc_feature 1..76: note = Description of sequence: tRNA-based effector molecule; TREM No.: 695
  source 1..76: mol_type = other RNA

SEQ ID NO: 1458 - RNA, 76 nt, synthetic construct; identical to SEQ ID NO: 730
  misc_feature 1..76: note = Description of sequence: tRNA-based effector molecule; TREM No.: 696
  source 1..76: mol_type = other RNA

SEQ ID NO: 1459 - RNA, 76 nt, synthetic construct; identical to SEQ ID NO: 728
  misc_feature 1..76: note = Description of sequence: tRNA-based effector molecule; TREM No.: 697
  source 1..76: mol_type = other RNA

SEQ ID NO: 1460 - RNA, 76 nt, synthetic construct; identical to SEQ ID NO: 751
  misc_feature 1..76: note = Description of sequence: tRNA-based effector molecule; TREM No.: 698
  source 1..76: mol_type = other RNA

SEQ ID NO: 1461 - RNA, 76 nt, synthetic construct; identical to SEQ ID NO: 665
  misc_feature 1..76: note = Description of sequence: tRNA-based effector molecule; TREM No.: 699
  source 1..76: mol_type = other RNA

SEQ ID NO: 1462 - RNA, 76 nt, synthetic construct; identical to SEQ ID NO: 661
  misc_feature 1..76: note = Description of sequence: tRNA-based effector molecule; TREM No.: 700
  source 1..76: mol_type = other RNA

SEQ ID NO: 1463 - RNA, 76 nt, synthetic construct; identical to SEQ ID NO: 689
  misc_feature 1..76: note = Description of sequence: tRNA-based effector molecule; TREM No.: 701
  source 1..76: mol_type = other RNA

SEQ ID NO: 1464 - RNA, 76 nt, synthetic construct; identical to SEQ ID NO: 775
  misc_feature 1..76: note = Description of sequence: tRNA-based effector molecule; TREM No.: 702
  source 1..76: mol_type = other RNA

SEQ ID NO: 1465 - RNA, 76 nt, synthetic construct; identical to SEQ ID NO: 644
  misc_feature 1..76: note = Description of sequence: tRNA-based effector molecule; TREM No.: 703
  source 1..76: mol_type = other RNA

SEQ ID NO: 1466 - RNA, 76 nt, synthetic construct; identical to SEQ ID NO: 663
  misc_feature 1..76: note = Description of sequence: tRNA-based effector molecule; TREM No.: 704
  source 1..76: mol_type = other RNA

SEQ ID NO: 1467 - RNA, 76 nt, synthetic construct; identical to SEQ ID NO: 672
  misc_feature 1..76: note = Description of sequence: tRNA-based effector molecule; TREM No.: 705
  source 1..76: mol_type = other RNA

SEQ ID NO: 1468 - RNA, 76 nt, synthetic construct; identical to SEQ ID NO: 657
  misc_feature 1..76: note = Description of sequence: tRNA-based effector molecule; TREM No.: 706
  source 1..76: mol_type = other RNA

SEQ ID NO: 1469 - RNA, 76 nt, synthetic construct; identical to SEQ ID NO: 641
  misc_feature 1..76: note = Description of sequence: tRNA-based effector molecule; TREM No.: 707
  source 1..76: mol_type = other RNA

SEQ ID NO: 1470 - RNA, 76 nt, synthetic construct; identical to SEQ ID NO: 693
  misc_feature 1..76: note = Description of sequence: tRNA-based effector molecule; TREM No.: 708
  source 1..76: mol_type = other RNA

SEQ ID NO: 1471 - RNA, 76 nt, synthetic construct; identical to SEQ ID NO: 740
  misc_feature 1..76: note = Description of sequence: tRNA-based effector molecule; TREM No.: 709
  source 1..76: mol_type = other RNA

SEQ ID NO: 1472 - RNA, 76 nt, synthetic construct; identical to SEQ ID NO: 679
  misc_feature 1..76: note = Description of sequence: tRNA-based effector molecule; TREM No.: 710
  source 1..76: mol_type = other RNA

SEQ ID NO: 1473 - RNA, 76 nt, synthetic construct; identical to SEQ ID NO: 710
  misc_feature 1..76: note = Description of sequence: tRNA-based effector molecule; TREM No.: 711
  source 1..76: mol_type = other RNA

SEQ ID NO: 1474 - RNA, 76 nt, synthetic construct; identical to SEQ ID NO: 743
  misc_feature 1..76: note = Description of sequence: tRNA-based effector molecule; TREM No.: 712
  source 1..76: mol_type = other RNA

SEQ ID NO: 1475 - RNA, 76 nt, synthetic construct; identical to SEQ ID NO: 776
  misc_feature 1..76: note = Description of sequence: tRNA-based effector molecule; TREM No.: 713
  source 1..76: mol_type = other RNA

SEQ ID NO: 1476 - RNA, 76 nt, synthetic construct; identical to SEQ ID NO: 707
  misc_feature 1..76: note = Description of sequence: tRNA-based effector molecule; TREM No.: 714
  source 1..76: mol_type = other RNA

SEQ ID NO: 1477 - RNA, 76 nt, synthetic construct; identical to SEQ ID NO: 733
  misc_feature 1..76: note = Description of sequence: tRNA-based effector molecule; TREM No.: 715
  source 1..76: mol_type = other RNA

SEQ ID NO: 1478 - RNA, 76 nt, synthetic construct; identical to SEQ ID NO: 700
  misc_feature 1..76: note = Description of sequence: tRNA-based effector molecule; TREM No.: 716
  source 1..76: mol_type = other RNA

SEQ ID NO: 1479 - RNA, 76 nt, synthetic construct; identical to SEQ ID NO: 756
  misc_feature 1..76: note = Description of sequence: tRNA-based effector molecule; TREM No.: 717
  source 1..76: mol_type = other RNA

SEQ ID NO: 1480 - RNA, 76 nt, synthetic construct; identical to SEQ ID NO: 750
  misc_feature 1..76: note = Description of sequence: tRNA-based effector molecule; TREM No.: 718
  source 1..76: mol_type = other RNA

SEQ ID NO: 1481 - RNA, 76 nt, synthetic construct; identical to SEQ ID NO: 746
  misc_feature 1..76: note = Description of sequence: tRNA-based effector molecule; TREM No.: 719
  source 1..76: mol_type = other RNA

SEQ ID NO: 1482 - RNA, 76 nt, synthetic construct; identical to SEQ ID NO: 778
  misc_feature 1..76: note = Description of sequence: tRNA-based effector molecule; TREM No.: 720
  source 1..76: mol_type = other RNA

SEQ ID NO: 1483 - RNA, 76 nt, synthetic construct; identical to SEQ ID NO: 640
  misc_feature 1..76: note = Description of sequence: tRNA-based effector molecule; TREM No.: 721
  source 1..76: mol_type = other RNA

SEQ ID NO: 1484 - RNA, 76 nt, synthetic construct; identical to SEQ ID NO: 636
  misc_feature 1..76: note = Description of sequence: tRNA-based effector molecule; TREM No.: 722
  source 1..76: mol_type = other RNA

SEQ ID NO: 1485 - RNA, 76 nt, synthetic construct; identical to SEQ ID NO: 703
  misc_feature 1..76: note = Description of sequence: tRNA-based effector molecule; TREM No.: 723
  source 1..76: mol_type = other RNA

SEQ ID NO: 1486 - RNA, 76 nt, synthetic construct; identical to SEQ ID NO: 682
  misc_feature 1..76: note = Description of sequence: tRNA-based effector molecule; TREM No.: 724
  source 1..76: mol_type = other RNA

SEQ ID NO: 1487 - RNA, 76 nt, synthetic construct; identical to SEQ ID NO: 712
  misc_feature 1..76: note = Description of sequence: tRNA-based effector molecule; TREM No.: 725
  source 1..76: mol_type = other RNA

SEQ ID NO: 1488 - RNA, 76 nt, synthetic construct; identical to SEQ ID NO: 690
  misc_feature 1..76: note = Description of sequence: tRNA-based effector molecule; TREM No.: 726
  source 1..76: mol_type = other RNA

SEQ ID NO: 1489 - RNA, 76 nt, synthetic construct; identical to SEQ ID NO: 692
  misc_feature 1..76: note = Description of sequence: tRNA-based effector molecule; TREM No.: 727
  source 1..76: mol_type = other RNA

SEQ ID NO: 1490 - RNA, 76 nt, synthetic construct; identical to SEQ ID NO: 696
  misc_feature 1..76: note = Description of sequence: tRNA-based effector molecule; TREM No.: 728
  source 1..76: mol_type = other RNA

SEQ ID NO: 1491 - RNA, 76 nt, synthetic construct; identical to SEQ ID NO: 673
  misc_feature 1..76: note = Description of sequence: tRNA-based effector molecule; TREM No.: 729
  source 1..76: mol_type = other RNA

SEQ ID NO: 1492 - RNA, 76 nt, synthetic construct; identical to SEQ ID NO: 652
  misc_feature 1..76: note = Description of sequence: tRNA-based effector molecule; TREM No.: 730
  source 1..76: mol_type = other RNA

SEQ ID NO: 1493 - RNA, 76 nt, synthetic construct; identical to SEQ ID NO: 684
  misc_feature 1..76: note = Description of sequence: tRNA-based effector molecule; TREM No.: 731
  source 1..76: mol_type = other RNA

SEQ ID NO: 1494 - RNA, 76 nt, synthetic construct; identical to SEQ ID NO: 780
  misc_feature 1..76: note = Description of sequence: tRNA-based effector molecule; TREM No.: 732
  source 1..76: mol_type = other RNA

SEQ ID NO: 1495 - RNA, 76 nt, synthetic construct; identical to SEQ ID NO: 660
  misc_feature 1..76: note = Description of sequence: tRNA-based effector molecule; TREM No.: 733
  source 1..76: mol_type = other RNA

SEQ ID NO: 1496 - RNA, 76 nt, synthetic construct; identical to SEQ ID NO: 678
  misc_feature 1..76: note = Description of sequence: tRNA-based effector molecule; TREM No.: 734
  source 1..76: mol_type = other RNA

SEQ ID NO: 1497 - RNA, 76 nt, synthetic construct; identical to SEQ ID NO: 697
  misc_feature 1..76: note = Description of sequence: tRNA-based effector molecule; TREM No.: 735
  source 1..76: mol_type = other RNA

SEQ ID NO: 1498 - RNA, 76 nt, synthetic construct; identical to SEQ ID NO: 758
  misc_feature 1..76: note = Description of sequence: tRNA-based effector molecule; TREM No.: 736
  source 1..76: mol_type = other RNA

SEQ ID NO: 1499 - RNA, 76 nt, synthetic construct; identical to SEQ ID NO: 792
  misc_feature 1..76: note = Description of sequence: tRNA-based effector molecule; TREM No.: 737
  source 1..76: mol_type = other RNA

SEQ ID NO: 1500 - RNA, 76 nt, synthetic construct; identical to SEQ ID NO: 749
  misc_feature 1..76: note = Description of sequence: tRNA-based effector molecule; TREM No.: 738
  source 1..76: mol_type = other RNA

SEQ ID NO: 1501 - RNA, 76 nt, synthetic construct; identical to SEQ ID NO: 643
  misc_feature 1..76: note = Description of sequence: tRNA-based effector molecule; TREM No.: 739
  source 1..76: mol_type = other RNA

SEQ ID NO: 1502 - RNA, 76 nt, synthetic construct; identical to SEQ ID NO: 670
  misc_feature 1..76: note = Description of sequence: tRNA-based effector molecule; TREM No.: 740
  source 1..76: mol_type = other RNA

SEQ ID NO: 1503 - RNA, 76 nt, synthetic construct; identical to SEQ ID NO: 713
  misc_feature 1..76: note = Description of sequence: tRNA-based effector molecule; TREM No.: 741
  source 1..76: mol_type = other RNA

SEQ ID NO: 1504 - RNA, 76 nt, synthetic construct; identical to SEQ ID NO: 742
  misc_feature 1..76: note = Description of sequence: tRNA-based effector molecule; TREM No.: 742
  source 1..76: mol_type = other RNA

SEQ ID NO: 1505 - RNA, 76 nt, synthetic construct; identical to SEQ ID NO: 635
  misc_feature 1..76: note = Description of sequence: tRNA-based effector molecule; TREM No.: 743
  source 1..76: mol_type = other RNA

SEQ ID NO: 1506 - RNA, 76 nt, synthetic construct; identical to SEQ ID NO: 699
  misc_feature 1..76: note = Description of sequence: tRNA-based effector molecule; TREM No.: 744
  source 1..76: mol_type = other RNA

SEQ ID NO: 1507 - RNA, 76 nt, synthetic construct; identical to SEQ ID NO: 715
  misc_feature 1..76: note = Description of sequence: tRNA-based effector molecule; TREM No.: 745
  source 1..76: mol_type = other RNA

SEQ ID NO: 1508 - RNA, 76 nt, synthetic construct; identical to SEQ ID NO: 747
  misc_feature 1..76: note = Description of sequence: tRNA-based effector molecule; TREM No.: 746
  source 1..76: mol_type = other RNA

SEQ ID NO: 1509 - RNA, 76 nt, synthetic construct; identical to SEQ ID NO: 766
  misc_feature 1..76: note = Description of sequence: tRNA-based effector molecule; TREM No.: 747
  source 1..76: mol_type = other RNA

SEQ ID NO: 1510 - RNA, 76 nt, synthetic construct; identical to SEQ ID NO: 729
  misc_feature 1..76: note = Description of sequence: tRNA-based effector molecule; TREM No.: 748
  source 1..76: mol_type = other RNA

SEQ ID NO: 1511 - RNA, 76 nt, synthetic construct; identical to SEQ ID NO: 770
  misc_feature 1..76: note = Description of sequence: tRNA-based effector molecule; TREM No.: 749
  source 1..76: mol_type = other RNA

SEQ ID NO: 1512 - RNA, 76 nt, synthetic construct; identical to SEQ ID NO: 720
  misc_feature 1..76: note = Description of sequence: tRNA-based effector molecule; TREM No.: 750
  source 1..76: mol_type = other RNA

SEQ ID NO: 1513 - RNA, 76 nt, synthetic construct; identical to SEQ ID NO: 790
  misc_feature 1..76: note = Description of sequence: tRNA-based effector molecule; TREM No.: 751
  source 1..76: mol_type = other RNA

SEQ ID NO: 1514 - RNA, 76 nt, synthetic construct; identical to SEQ ID NO: 745
  misc_feature 1..76: note = Description of sequence: tRNA-based effector molecule; TREM No.: 752
  source 1..76: mol_type = other RNA

SEQ ID NO: 1515 - RNA, 76 nt, synthetic construct; identical to SEQ ID NO: 695
  misc_feature 1..76: note = Description of sequence: tRNA-based effector molecule; TREM No.: 753
  source 1..76: mol_type = other RNA

SEQ ID NO: 1516 - RNA, 76 nt, synthetic construct; identical to SEQ ID NO: 659
  misc_feature 1..76: note = Description of sequence: tRNA-based effector molecule; TREM No.: 754
  source 1..76: mol_type = other RNA

SEQ ID NO: 1517 - RNA, 76 nt, synthetic construct; identical to SEQ ID NO: 771
  misc_feature 1..76: note = Description of sequence: tRNA-based effector molecule; TREM No.: 755
  source 1..76: mol_type = other RNA

SEQ ID NO: 1518 - RNA, 76 nt, synthetic construct; identical to SEQ ID NO: 769
  misc_feature 1..76: note = Description of sequence: tRNA-based effector molecule; TREM No.: 756
  source 1..76: mol_type = other RNA

SEQ ID NO: 1519 - RNA, 76 nt, synthetic construct; identical to SEQ ID NO: 680
  misc_feature 1..76: note = Description of sequence: tRNA-based effector molecule; TREM No.: 757
  source 1..76: mol_type = other RNA

SEQ ID NO: 1520 - RNA, 76 nt, synthetic construct; identical to SEQ ID NO: 793
  misc_feature 1..76: note = Description of sequence: tRNA-based effector molecule; TREM No.: 758
  source 1..76: mol_type = other RNA

SEQ ID NO: 1521 - RNA, 76 nt, synthetic construct; identical to SEQ ID NO: 642
  misc_feature 1..76: note = Description of sequence: tRNA-based effector molecule; TREM No.: 759
  source 1..76: mol_type = other RNA

SEQ ID NO: 1522 - RNA, 76 nt, synthetic construct; identical to SEQ ID NO: 677
  misc_feature 1..76: note = Description of sequence: tRNA-based effector molecule; TREM No.: 760
  source 1..76: mol_type = other RNA

SEQ ID NO: 1523 - RNA, 76 nt, synthetic construct; identical to SEQ ID NO: 772
  misc_feature 1..76: note = Description of sequence: tRNA-based effector molecule; TREM No.: 761
  source 1..76: mol_type = other RNA

SEQ ID NO: 1524 - RNA, 76 nt, synthetic construct; identical to SEQ ID NO: 650
  misc_feature 1..76: note = Description of sequence: tRNA-based effector molecule; TREM No.: 762
  source 1..76: mol_type = other RNA

SEQ ID NO: 1525 - RNA, 76 nt, synthetic construct; identical to SEQ ID NO: 647
  misc_feature 1..76: note = Description of sequence: tRNA-based effector molecule; TREM No.: 763
  source 1..76: mol_type = other RNA

SEQ ID NO: 1526 - RNA, 76 nt, synthetic construct; identical to SEQ ID NO: 738
  misc_feature 1..76: note = Description of sequence: tRNA-based effector molecule; TREM No.: 764
  source 1..76: mol_type = other RNA

SEQ ID NO: 1527 - RNA, 76 nt, synthetic construct; identical to SEQ ID NO: 662
  misc_feature 1..76: note = Description of sequence: tRNA-based effector molecule; TREM No.: 765
  source 1..76: mol_type = other RNA

SEQ ID NO: 1528 - RNA, 76 nt, synthetic construct; identical to SEQ ID NO: 634
  misc_feature 1..76: note = Description of sequence: tRNA-based effector molecule; TREM No.: 766
  source 1..76: mol_type = other RNA

SEQ ID NO: 1529 - RNA, 76 nt, synthetic construct; identical to SEQ ID NO: 687
  misc_feature 1..76: note = Description of sequence: tRNA-based effector molecule; TREM No.: 767
  source 1..76: mol_type = other RNA

SEQ ID NO: 1530 - RNA, 76 nt, synthetic construct; identical to SEQ ID NO: 688
  misc_feature 1..76: note = Description of sequence: tRNA-based effector molecule; TREM No.: 768
  source 1..76: mol_type = other RNA

SEQ ID NO: 1531 - RNA, 76 nt, synthetic construct; identical to SEQ ID NO: 759
  misc_feature 1..76: note = Description of sequence: tRNA-based effector molecule; TREM No.: 769
  source 1..76: mol_type = other RNA

SEQ ID NO: 1532 - RNA, 76 nt, synthetic construct; identical to SEQ ID NO: 686
  misc_feature 1..76: note = Description of sequence: tRNA-based effector molecule; TREM No.: 770
  source 1..76: mol_type = other RNA

SEQ ID NO: 1533 - RNA, 76 nt, synthetic construct; identical to SEQ ID NO: 639
  misc_feature 1..76: note = Description of sequence: tRNA-based effector molecule; TREM No.: 771
  source 1..76: mol_type = other RNA

SEQ ID NO: 1534 - RNA, 76 nt, synthetic construct; identical to SEQ ID NO: 773
  misc_feature 1..76: note = Description of sequence: tRNA-based effector molecule; TREM No.: 772
  source 1..76: mol_type = other RNA

SEQ ID NO: 1535 - RNA, 76 nt, synthetic construct; identical to SEQ ID NO: 646
  misc_feature 1..76: note = Description of sequence: tRNA-based effector molecule; TREM No.: 773
  source 1..76: mol_type = other RNA

SEQ ID NO: 1536 - RNA, 76 nt, synthetic construct
  misc_feature 1..76: note = Description of sequence: tRNA-based effector molecule; TREM No.: 774
  source 1..76: mol_type = other RNA
ggctccgtggcgcaatggatagcgcattggacttcatattcaaaggttccgggttcgagtcccggcggagtcgcca

SEQ ID NO: 1537 - RNA, 76 nt, synthetic construct; identical to SEQ ID NO: 674
  misc_feature 1..76: note = Description of sequence: tRNA-based effector molecule; TREM No.: 775
  source 1..76: mol_type = other RNA

SEQ ID NO: 1538 - RNA, 76 nt, synthetic construct; identical to SEQ ID NO: 714
  misc_feature 1..76: note = Description of sequence: tRNA-based effector molecule; TREM No.: 776
  source 1..76: mol_type = other RNA

SEQ ID NO: 1539 - RNA, 76 nt, synthetic construct; identical to SEQ ID NO: 763
  misc_feature 1..76: note = Description of sequence: tRNA-based effector molecule; TREM No.: 777
  source 1..76: mol_type = other RNA

SEQ ID NO: 1540 - RNA, 76 nt, synthetic construct; identical to SEQ ID NO: 717
  misc_feature 1..76: note = Description of sequence: tRNA-based effector molecule; TREM No.: 778
  source 1..76: mol_type = other RNA

SEQ ID NO: 1541 - RNA, 76 nt, synthetic construct; identical to SEQ ID NO: 648
  misc_feature 1..76: note = Description of sequence: tRNA-based effector molecule; TREM No.: 779
  source 1..76: mol_type = other RNA

SEQ ID NO: 1542 - RNA, 76 nt, synthetic construct; identical to SEQ ID NO: 788
  misc_feature 1..76: note = Description of sequence: tRNA-based effector molecule; TREM No.: 780
  source 1..76: mol_type = other RNA

SEQ ID NO: 1543 - RNA, 76 nt, synthetic construct; identical to SEQ ID NO: 664
  misc_feature 1..76: note = Description of sequence: tRNA-based effector molecule; TREM No.: 781
  source 1..76: mol_type = other RNA

SEQ ID NO: 1544 - RNA, 76 nt, synthetic construct; identical to SEQ ID NO: 694
  misc_feature 1..76: note = Description of sequence: tRNA-based effector molecule; TREM No.: 782
  source 1..76: mol_type = other RNA

SEQ ID NO: 1545 - RNA, 76 nt, synthetic construct; identical to SEQ ID NO: 685
  misc_feature 1..76: note = Description of sequence: tRNA-based effector molecule; TREM No.: 783
  source 1..76: mol_type = other RNA

SEQ ID NO: 1546 - RNA, 76 nt, synthetic construct; identical to SEQ ID NO: 698
  misc_feature 1..76: note = Description of sequence: tRNA-based effector molecule; TREM No.: 784
  source 1..76: mol_type = other RNA

SEQ ID NO: 1547 - RNA, 76 nt, synthetic construct; identical to SEQ ID NO: 781
  misc_feature 1..76: note = Description of sequence: tRNA-based effector molecule; TREM No.: 785
  source 1..76: mol_type = other RNA

SEQ ID NO: 1548 - RNA, 76 nt, synthetic construct; identical to SEQ ID NO: 748
  misc_feature 1..76: note = Description of sequence: tRNA-based effector molecule; TREM No.: 786
  source 1..76: mol_type = other RNA

SEQ ID NO: 1549 - RNA, 76 nt, synthetic construct; identical to SEQ ID NO: 669
  misc_feature 1..76: note = Description of sequence: tRNA-based effector molecule; TREM No.: 787
  source 1..76: mol_type = other RNA

SEQ ID NO: 1550 - RNA, 76 nt, synthetic construct; identical to SEQ ID NO: 645
  misc_feature 1..76: note = Description of sequence: tRNA-based effector molecule; TREM No.: 788
  source 1..76: mol_type = other RNA

SEQ ID NO: 1551 - RNA, 76 nt, synthetic construct; identical to SEQ ID NO: 649
  misc_feature 1..76: note = Description of sequence: tRNA-based effector molecule; TREM No.: 789
  source 1..76: mol_type = other RNA

SEQ ID NO: 1552 - RNA, 76 nt, synthetic construct; identical to SEQ ID NO: 789
  misc_feature 1..76: note = Description of sequence: tRNA-based effector molecule; TREM No.: 790
  source 1..76: mol_type = other RNA

SEQ ID NO: 1553 - RNA, 76 nt, synthetic construct; identical to SEQ ID NO: 782
  misc_feature 1..76: note = Description of sequence: tRNA-based effector molecule; TREM No.: 791
  source 1..76: mol_type = other RNA

SEQ ID NO: 1554 - RNA, 76 nt, synthetic construct; identical to SEQ ID NO: 784
  misc_feature 1..76: note = Description of sequence: tRNA-based effector molecule; TREM No.: 792
  source 1..76: mol_type = other RNA

SEQ ID NO: 1555 - RNA, 76 nt, synthetic construct; identical to SEQ ID NO: 655
  misc_feature 1..76: note = Description of sequence: tRNA-based effector molecule; TREM No.: 793
  source 1..76: mol_type = other RNA

SEQ ID NO: 1556 - RNA, 76 nt, synthetic construct; identical to SEQ ID NO: 767
  misc_feature 1..76: note = Description of sequence: tRNA-based effector molecule; TREM No.: 794
  source 1..76: mol_type = other RNA

SEQ ID NO: 1557 - RNA, 76 nt, synthetic construct; identical to SEQ ID NO: 791
  misc_feature 1..76: note = Description of sequence: tRNA-based effector molecule; TREM No.: 795
  source 1..76: mol_type = other RNA

SEQ ID NO: 1558 - RNA, 76 nt, synthetic construct; identical to SEQ ID NO: 724
  misc_feature 1..76: note = Description of sequence: tRNA-based effector molecule; TREM No.: 796
  source 1..76: mol_type = other RNA

SEQ ID NO: 1559 - RNA, 76 nt, synthetic construct; identical to SEQ ID NO: 762
  misc_feature 1..76: note = Description of sequence: tRNA-based effector molecule; TREM No.: 797
  source 1..76: mol_type = other RNA

SEQ ID NO: 1560 - RNA, 76 nt, synthetic construct; identical to SEQ ID NO: 638
  misc_feature 1..76: note = Description of sequence: tRNA-based effector molecule; TREM No.: 798
  source 1..76: mol_type = other RNA

SEQ ID NO: 1561 - RNA, 76 nt, synthetic construct; identical to SEQ ID NO: 653
  misc_feature 1..76: note = Description of sequence: tRNA-based effector molecule; TREM No.: 799
  source 1..76: mol_type = other RNA

SEQ ID NO: 1562 - RNA, 76 nt, synthetic construct; identical to SEQ ID NO: 666
  misc_feature 1..76: note = Description of sequence: tRNA-based effector molecule; TREM No.: 800
  source 1..76: mol_type = other RNA

SEQ ID NO: 1563 - RNA, 76 nt, synthetic construct; identical to SEQ ID NO: 656
  misc_feature 1..76: note = Description of sequence: tRNA-based effector molecule; TREM No.: 801
  source 1..76: mol_type = other RNA

SEQ ID NO: 1564 - RNA, 76 nt, synthetic construct; identical to SEQ ID NO: 654
  misc_feature 1..76: note = Description of sequence: tRNA-based effector molecule; TREM No.: 802
  source 1..76: mol_type = other RNA

SEQ ID NO: 1565 - RNA, 76 nt, synthetic construct
  misc_feature 1..76: note = Description of sequence: tRNA-based effector molecule; TREM No.: 803
  source 1..76: mol_type = other RNA
ggctctgtggcgcaatggatagcgcattggacttcaaattcaaaggttgcgggttcgagtcccgccagagtcgcca

SEQ ID NO: 1566 - RNA, 76 nt, synthetic construct; identical to SEQ ID NO: 777
  misc_feature 1..76: note = Description of sequence: tRNA-based effector molecule; TREM No.: 804
  source 1..76: mol_type = other RNA

SEQ ID NO: 1567 - RNA, 76 nt, synthetic construct; identical to SEQ ID NO: 757
  misc_feature 1..76: note = Description of sequence: tRNA-based effector molecule; TREM No.: 805
  source 1..76: mol_type = other RNA

SEQ ID NO: 1568 - RNA, 76 nt, synthetic construct; identical to SEQ ID NO: 681
  misc_feature 1..76: note = Description of sequence: tRNA-based effector molecule; TREM No.: 806
  source 1..76: mol_type = other RNA

SEQ ID NO: 1569 - RNA, 76 nt, synthetic construct; identical to SEQ ID NO: 709
  misc_feature 1..76: note = Description of sequence: tRNA-based effector molecule; TREM No.: 807
  source 1..76: mol_type = other RNA

SEQ ID NO: 1570 - RNA, 76 nt, synthetic construct; identical to SEQ ID NO: 754
  misc_feature 1..76: note = Description of sequence: tRNA-based effector molecule; TREM No.: 808
  source 1..76: mol_type = other RNA

SEQ ID NO: 1571 - RNA, 76 nt, synthetic construct; identical to SEQ ID NO: 774
  misc_feature 1..76: note = Description of sequence: tRNA-based effector molecule; TREM No.: 809
  source 1..76: mol_type = other RNA

SEQ ID NO: 1572 - RNA, 76 nt, synthetic construct; identical to SEQ ID NO: 701
  misc_feature 1..76: note = Description of sequence: tRNA-based effector molecule; TREM No.: 810
  source 1..76: mol_type = other RNA

SEQ ID NO: 1573 - RNA, 76 nt, synthetic construct; identical to SEQ ID NO: 716
  misc_feature 1..76: note = Description of sequence: tRNA-based effector molecule; TREM No.: 811
  source 1..76: mol_type = other RNA

SEQ ID NO: 1574 - RNA, 76 nt, synthetic construct; identical to SEQ ID NO: 786
  misc_feature 1..76: note = Description of sequence: tRNA-based effector molecule; TREM No.: 812
  source 1..76: mol_type = other RNA

SEQ ID NO: 1575 - RNA, 76 nt, synthetic construct; identical to SEQ ID NO: 683
  misc_feature 1..76: note = Description of sequence: tRNA-based effector molecule; TREM No.: 813
  source 1..76: mol_type = other RNA

SEQ ID NO: 1576 - RNA, 76 nt, synthetic construct; identical to SEQ ID NO: 702
  misc_feature 1..76: note = Description of sequence: tRNA-based effector molecule; TREM No.: 814
  source 1..76: mol_type = other RNA

SEQ ID NO: 1577 - RNA, 76 nt, synthetic construct; identical to SEQ ID NO: 667
  misc_feature 1..76: note = Description of sequence: tRNA-based effector molecule; TREM No.: 815
  source 1..76: mol_type = other RNA

SEQ ID NO: 1578 - RNA, 76 nt, synthetic construct; identical to SEQ ID NO: 764
  misc_feature 1..76: note = Description of sequence: tRNA-based effector molecule; TREM No.: 816
  source 1..76: mol_type = other RNA

SEQ ID NO: 1579 - RNA, 76 nt, synthetic construct; identical to SEQ ID NO: 637
  misc_feature 1..76: note = Description of sequence: tRNA-based effector molecule; TREM No.: 817
  source 1..76: mol_type = other RNA

SEQ ID NO: 1580 - RNA, 76 nt, synthetic construct; identical to SEQ ID NO: 668
  misc_feature 1..76: note = Description of sequence: tRNA-based effector molecule; TREM No.: 818
  source 1..76: mol_type = other RNA

SEQ ID NO: 1581 - RNA, 76 nt, synthetic construct; identical to SEQ ID NO: 739
  misc_feature 1..76: note = Description of sequence: tRNA-based effector molecule; TREM No.: 819
  source 1..76: mol_type = other RNA

SEQ ID NO: 1582 - RNA, 76 nt, synthetic construct; identical to SEQ ID NO: 787
  misc_feature 1..76: note = Description of sequence: tRNA-based effector molecule; TREM No.: 820
  source 1..76: mol_type = other RNA

SEQ ID NO: 1583 - RNA, 76 nt, synthetic construct; identical to SEQ ID NO: 753
  misc_feature 1..76: note = Description of sequence: tRNA-based effector molecule; TREM No.: 821
  source 1..76: mol_type = other RNA

SEQ ID NO: 1584 - RNA, 76 nt, synthetic construct; identical to SEQ ID NO: 779
  misc_feature 1..76: note = Description of sequence: tRNA-based effector molecule; TREM No.: 822
  source 1..76: mol_type = other RNA

SEQ ID NO: 1585 - RNA, 76 nt, synthetic construct; identical to SEQ ID NO: 744
  misc_feature 1..76: note = Description of sequence: tRNA-based effector molecule; TREM No.: 823
  source 1..76: mol_type = other RNA

SEQ ID NO: 1586 - RNA, 76 nt, synthetic construct; identical to SEQ ID NO: 725
  misc_feature 1..76: note = Description of sequence: tRNA-based effector molecule; TREM No.: 824
  source 1..76: mol_type = other RNA

SEQ ID NO: 1587 - RNA, 76 nt, synthetic construct; identical to SEQ ID NO: 723
  misc_feature 1..76: note = Description of sequence: tRNA-based effector molecule; TREM No.: 825
  source 1..76: mol_type = other RNA

SEQ ID NO: 1588 - RNA, 76 nt, synthetic construct; identical to SEQ ID NO: 676
  misc_feature 1..76: note = Description of sequence: tRNA-based effector molecule; TREM No.: 826
  source 1..76: mol_type = other RNA

SEQ ID NO: 1589 - RNA, 76 nt, synthetic construct; identical to SEQ ID NO: 785
  misc_feature 1..76: note = Description of sequence: tRNA-based effector molecule; TREM No.: 827
  source 1..76: mol_type = other RNA

SEQ ID NO: 1590 - RNA, 76 nt, synthetic construct; identical to SEQ ID NO: 719
  misc_feature 1..76: note = Description of sequence: tRNA-based effector molecule; TREM No.: 828
  source 1..76: mol_type = other RNA

SEQ ID NO: 1591 - RNA, 76 nt, synthetic construct; identical to SEQ ID NO: 705
  misc_feature 1..76: note = Description of sequence: tRNA-based effector molecule; TREM No.: 829
  source 1..76: mol_type = other RNA

SEQ ID NO: 1592 - RNA, 76 nt, synthetic construct; identical to SEQ ID NO: 783
  misc_feature 1..76: note = Description of sequence: tRNA-based effector molecule; TREM No.: 830
  source 1..76: mol_type = other RNA

SEQ ID NO: 1593 - RNA, 76 nt, synthetic construct; identical to SEQ ID NO: 765
  misc_feature 1..76: note = Description of sequence: tRNA-based effector molecule; TREM No.: 831
  source 1..76: mol_type = other RNA

SEQ ID NO: 1594 - RNA, 76 nt, synthetic construct; identical to SEQ ID NO: 708
  misc_feature 1..76: note = Description of sequence: tRNA-based effector molecule; TREM No.: 832
  source 1..76: mol_type = other RNA

SEQ ID NO: 1595 - RNA, 76 nt, synthetic construct; identical to SEQ ID NO: 731
  misc_feature 1..76: note = Description of sequence: tRNA-based effector molecule; TREM No.: 833
  source 1..76: mol_type = other RNA

SEQ ID NO: 1596 - RNA, 76 nt, synthetic construct; identical to SEQ ID NO: 755
  misc_feature 1..76: note = Description of sequence: tRNA-based effector molecule; TREM No.: 834
  source 1..76: mol_type = other RNA

SEQ ID NO: 1597 - RNA, 76 nt, synthetic construct; identical to SEQ ID NO: 727
  misc_feature 1..76: note = Description of sequence: tRNA-based effector molecule; TREM No.: 835
  source 1..76: mol_type = other RNA

SEQ ID NO: 1598 - RNA, 76 nt, synthetic construct; identical to SEQ ID NO: 671
  misc_feature 1..76: note = Description of sequence: tRNA-based effector molecule; TREM No.: 836
  source 1..76: mol_type = other RNA

SEQ ID NO: 1599 - RNA, 76 nt, synthetic construct; identical to SEQ ID NO: 675
  misc_feature 1..76: note = Description of sequence: tRNA-based effector molecule; TREM No.: 837
  source 1..76: mol_type = other RNA

SEQ ID NO: 1600 - RNA, 76 nt, synthetic construct; identical to SEQ ID NO: 651
  misc_feature 1..76: note = Description of sequence: tRNA-based effector molecule; TREM No.: 838
  source 1..76: mol_type = other RNA

SEQ ID NO: 1601 - RNA, 76 nt, synthetic construct; identical to SEQ ID NO: 726
  misc_feature 1..76: note = Description of sequence: tRNA-based effector molecule; TREM No.: 839
  source 1..76: mol_type = other RNA

SEQ ID NO: 1602 - RNA, 76 nt, synthetic construct; identical to SEQ ID NO: 691
  misc_feature 1..76: note = Description of sequence: tRNA-based effector molecule; TREM No.: 840
  source 1..76: mol_type = other RNA

SEQ ID NO: 1603 - RNA, 76 nt, synthetic construct; identical to SEQ ID NO: 760
  misc_feature 1..76: note = Description of sequence: tRNA-based effector molecule; TREM No.: 841
  source 1..76: mol_type = other RNA

SEQ ID NO: 1604 - RNA, 76 nt, synthetic construct; identical to SEQ ID NO: 732
  misc_feature 1..76: note = Description of sequence: tRNA-based effector molecule; TREM No.: 842
  source 1..76: mol_type = other RNA

SEQ ID NO: 1605 - RNA, 76 nt, synthetic construct; identical to SEQ ID NO: 658
  misc_feature 1..76: note = Description of sequence: tRNA-based effector molecule; TREM No.: 843
  source 1..76: mol_type = other RNA

SEQ ID NO: 1606 - RNA, 76 nt, synthetic construct; identical to SEQ ID NO: 737
  misc_feature 1..76: note = Description of sequence: tRNA-based effector molecule; TREM No.: 844
  source 1..76: mol_type = other RNA

SEQ ID NO: 1607 - RNA, 76 nt, synthetic construct; identical to SEQ ID NO: 768
  misc_feature 1..76: note = Description of sequence: tRNA-based effector molecule; TREM No.: 845
  source 1..76: mol_type = other RNA

SEQ ID NO: 1608 - RNA, 76 nt, synthetic construct; identical to SEQ ID NO: 736
  misc_feature 1..76: note = Description of sequence: tRNA-based effector molecule; TREM No.: 846
  source 1..76: mol_type = other RNA

SEQ ID NO: 1609 - RNA, 76 nt, synthetic construct; identical to SEQ ID NO: 718
  misc_feature 1..76: note = Description of sequence: tRNA-based effector molecule; TREM No.: 847
  source 1..76: mol_type = other RNA

SEQ ID NO: 1610 - RNA, 76 nt, synthetic construct; identical to SEQ ID NO: 735
  misc_feature 1..76: note = Description of sequence: tRNA-based effector molecule; TREM No.: 848
  source 1..76: mol_type = other RNA

SEQ ID NO: 1611 - RNA, 76 nt, synthetic construct; identical to SEQ ID NO: 722
  misc_feature 1..76: note = Description of sequence: tRNA-based effector molecule; TREM No.: 849
  source 1..76: mol_type = other RNA

SEQ ID NO: 1612 - RNA, 76 nt, synthetic construct; identical to SEQ ID NO: 721
  misc_feature 1..76: note = Description of sequence: tRNA-based effector molecule; TREM No.: 850
  source 1..76: mol_type = other RNA

SEQ ID NO: 1613 - RNA, 76 nt, synthetic construct
  misc_feature 1..76: note = Description of sequence: tRNA-based effector molecule; TREM No.: 851
  source 1..76: mol_type = other RNA
ggctccgtggcgcaatggatagcgcattggacttcaaattcaaaggttccgggttcgagtcccggcggagtcacca

SEQ ID NO: 1614 - RNA, 76 nt, synthetic construct; identical to SEQ ID NO: 704
  misc_feature 1..76: note = Description of sequence: tRNA-based effector molecule; TREM No.: 852
  source 1..76: mol_type = other RNA

SEQ ID NO: 1615 - RNA, 76 nt, synthetic construct; identical to SEQ ID NO: 752
  misc_feature 1..76: note = Description of sequence: tRNA-based effector molecule; TREM No.: 853
  source 1..76: mol_type = other RNA

SEQ ID NO: 1616 - RNA, 76 nt, synthetic construct; identical to SEQ ID NO: 711
  misc_feature 1..76: note = Description of sequence: tRNA-based effector molecule; TREM No.: 854
  source 1..76: mol_type = other RNA

SEQ ID NO: 1617 - RNA, 76 nt, synthetic construct; identical to SEQ ID NO: 741
  misc_feature 1..76: note = Description of sequence: tRNA-based effector molecule; TREM No.: 855
  source 1..76: mol_type = other RNA

SEQ ID NO: 1618 - RNA, 76 nt, synthetic construct
  misc_feature 1..76: note = Description of sequence: tRNA-based effector molecule; TREM No.: 856
  source 1..76: mol_type = other RNA
ggctccgtggcgcaatggttagcgcattggacttcaaattcaaaggttccgggttcgagtcccggcggagtcgcca

SEQ ID NO: 1619 - RNA, 76 nt, synthetic construct
  misc_feature 1..76: note = Description of sequence: tRNA-based effector molecule; TREM No.: 857
  source 1..76: mol_type = other RNA
ggctccgtggcgcaatggattgcgcattggacttcaaattcaaaggttccgggttcgagtcccggcggagtcgcca

SEQ ID NO: 1620 - RNA, 76 nt, synthetic construct; identical to SEQ ID NO: 706
  misc_feature 1..76: note = Description of sequence: tRNA-based effector molecule; TREM No.: 858
  source 1..76: mol_type = other RNA

SEQ ID NO: 1621 - RNA, 76 nt, synthetic construct; identical to SEQ ID NO: 805
  misc_feature 1..76: note = Description of sequence: tRNA-based effector molecule; TREM No.: 859
  source 1..76: mol_type = other RNA

SEQ ID NO: 1622 - RNA, 76 nt, synthetic construct
  misc_feature 1..76: note = Description of sequence: tRNA-based effector molecule; TREM No.: 860
  source 1..76: mol_type = other RNA
ggctccgtggcgcaatggatagcgcattggacttcaaattcaaatgttccgggttcgagtcccggcggagtcgcca

SEQ ID NO: 1623 - RNA, 76 nt, synthetic construct
  misc_feature 1..76: note = Description of sequence: tRNA-based effector molecule; TREM No.: 861
  source 1..76: mol_type = other RNA
ggctccgtggcgcaatggatagcgcattggacttcaaattcaaaggttccgggttcgagtcccggcggagccgcca

SEQ ID NO: 1624 - RNA, 73 nt, synthetic construct
  misc_feature 1..73: note = Description of sequence: tRNA-based effector molecule; TREM No.: 862
  source 1..73: mol_type = other RNA
ggctccgtggcgcaatggatagcgcattggacttcaaattcaaaggttccgggttcgagtcccggcggagccg

SEQ ID NO: 1625 - RNA, 76 nt, synthetic construct
  misc_feature 1..76: note = Description of sequence: tRNA-based effector molecule; TREM No.: 863
  source 1..76: mol_type = other RNA
ggctccgtggcgcaatggatagcgcattggacttcaaattcaaaggttccgggttctagtcccggcggagtcgcca

SEQ ID NO: 1626 - RNA, 76 nt, synthetic construct
  misc_feature 1..76: note = Description of sequence: tRNA-based effector molecule; TREM No.: 864
  source 1..76: mol_type = other RNA
ggctccgtggcgcaatggatagcgcattggacttcaaattcaaaggttccgggtttgagtcccggcggagtcgcca

SEQ ID NO: 1627 - RNA, 76 nt, synthetic construct
  misc_feature 1..76: note = Description of sequence: tRNA-based effector molecule; TREM No.: 865
  source 1..76: mol_type = other RNA
ggctccgtggcgcaatgtatagcgcattggacttcaaattcaaaggttccgggttcgagtcccggcggagtcgcca

SEQ ID NO: 1628 - RNA, 76 nt, synthetic construct
  misc_feature 1..76: note = Description of sequence: tRNA-based effector molecule; TREM No.: 866
  source 1..76: mol_type = other RNA
ggctccgtggcgcaatggatagcgcattggacttctaattcaaaggttccgggttcgagtcccggcggagtcgcca

SEQ ID NO: 1629 - RNA, 76 nt, synthetic construct
  misc_feature 1..76: note = Description of sequence: tRNA-based effector molecule; TREM No.: 867
  source 1..76: mol_type = other RNA
ggctccgtggcgcaatggatagcgcattggacttcaaattcaaaggttccgggttcgattcccggcggagtcgcca

SEQ ID NO: 1630 - RNA, 76 nt, synthetic construct
  misc_feature 1..76: note = Description of sequence: tRNA-based effector molecule; TREM No.: 868
  source 1..76: mol_type = other RNA
ggctccgtggcgcaattgatagcgcattggacttcaaattcaaaggttccgggttcgagtcccggcggagtcgcca

SEQ ID NO: 1631 - RNA, 76 nt, synthetic construct
  misc_feature 1..76: note = Description of sequence: tRNA-based effector molecule; TREM No.: 869
  source 1..76: mol_type = other RNA
ggctccgtggcgcattggatagcgcattggacttcaaattcaaaggttccgggttcgagtcccggcggagtcgcca

SEQ ID NO: 1632 - RNA, 76 nt, synthetic construct
  misc_feature 1..76: note = Description of sequence: tRNA-based effector molecule; TREM No.: 870
  source 1..76: mol_type = other RNA
ggctccgtggcgcaatggatagcgcattggacttcaaattcaaaggttccgggttcgtgtcccggcggagtcgcca

SEQ ID NO: 1633 - RNA, 76 nt, synthetic construct
  misc_feature 1..76: note = Description of sequence: tRNA-based effector molecule; TREM No.: 871
  source 1..76: mol_type = other RNA
ggctccgtggcgcaatggatagcgctttggacttcaaattcaaaggttccgggttcgagtcccggcggagtcgcca

SEQ ID NO: 1634 - RNA, 76 nt, synthetic construct
  misc_feature 1..76: note = Description of sequence: tRNA-based effector molecule; TREM No.: 872
  source 1..76: mol_type = other RNA
ggctccgtggcgcaatggatagcgcattggacttcaaattcaaagtttccgggttcgagtcccggcggagtcgcca

SEQ ID NO: 1635 - RNA, 76 nt, synthetic construct
  misc_feature 1..76: note = Description of sequence: tRNA-based effector molecule; TREM No.: 873
  source 1..76: mol_type = other RNA
ggctccgtggcgcaatggatagcgcattggatttcaaattcaaaggttccgggttcgagtcccggcggagtcgcca

SEQ ID NO: 1636 - RNA, 76 nt, synthetic construct
  misc_feature 1..76: note = Description of sequence: tRNA-based effector molecule; TREM No.: 874
  source 1..76: mol_type = other RNA
ggctccgtggcgctatggatagcgcattggacttcaaattcaaaggttccgggttcgagtcccggcggagtcgcca

SEQ ID NO: 1637 - RNA, 76 nt, synthetic construct
  misc_feature 1..76: note = Description of sequence: tRNA-based effector molecule; TREM No.: 875
  source 1..76: mol_type = other RNA
ggctccgtggcgcaatggatagcgcattggacttcaatttcaaaggttccgggttcgagtcccggcggagtcgcca

SEQ ID NO: 1638 - RNA, 76 nt, synthetic construct; identical to SEQ ID NO: 734
  misc_feature 1..76: note = Description of sequence: tRNA-based effector molecule; TREM No.: 876
  source 1..76: mol_type = other RNA

SEQ ID NO: 1639 - RNA, 75 nt, synthetic construct
  misc_feature 1..75: note = Description of sequence: tRNA-based effector molecule; TREM No.: 877
  source 1..75: mol_type = other RNA
ggttccatggtgtaatggtaagcactccggcctctaaagccagcgatccgagttcgagtctcggtggaacctcca

SEQ ID NO: 1640 - RNA, 75 nt, synthetic construct
  misc_feature 1..75: note = Description of sequence: tRNA-based effector molecule; TREM No.: 878
  source 1..75: mol_type = other RNA
ggttccatggtgtaatggtaagcactctggcctctaaatccagcgatccgagttcgagcctcggtggaacctcca

SEQ ID NO: 1641 - RNA, 75 nt, synthetic construct
  misc_feature 1..75: note = Description of sequence: tRNA-based effector molecule; TREM No.: 879
  source 1..75: mol_type = other RNA
ggttccatggtgtaatggtaagcacttcttactctaaataagaagatccgagttcgagtctcggtggaacctcca

SEQ ID NO: 1642 - RNA, 75 nt, synthetic construct
  misc_feature 1..75: note = Description of sequence: tRNA-based effector molecule; TREM No.: 880
  source 1..75: mol_type = other RNA
ggttccatggtgtaatggtaagcactctcacctctaaagtgagcgatccgagttcgagtctcggtggaacctcca

SEQ ID NO: 1643 - RNA, 75 nt, synthetic construct
  misc_feature 1..75: note = Description of sequence: tRNA-based effector molecule; TREM No.: 881
  source 1..75: mol_type = other RNA
ggttccatggtgtaatggtaagcactctggactctaaacccagcgacccgagttcgagtctcggtggaacctcca

SEQ ID NO: 1644 - RNA, 75 nt, synthetic construct
  misc_feature 1..75: note = Description of sequence: tRNA-based effector molecule; TREM No.: 882
  source 1..75: mol_type = other RNA
ggttccatggtgtaatggtaagcactctggactctaaacccagcgatccgagttcgagtctcggtggaaccccca

SEQ ID NO: 1645 - RNA, 75 nt, synthetic construct
  misc_feature 1..75: note = Description of sequence: tRNA-based effector molecule; TREM No.: 883
  source 1..75: mol_type = other RNA
ggttccatggtgtaatggtaagcactcatacctctaaagtatgcgatccgagttcgagtctcggtggaacctcca

SEQ ID NO: 1646 - RNA, 75 nt, synthetic construct
  misc_feature 1..75: note = Description of sequence: tRNA-based effector molecule; TREM No.: 884
  source 1..75: mol_type = other RNA
ggttccatggtgtaatggtaagcactcccgtctctaaaacgggcgatccgagttcgagtctcggtggaacctcca

SEQ ID NO: 1647 - RNA, 75 nt, synthetic construct
  misc_feature 1..75: note = Description of sequence: tRNA-based effector molecule; TREM No.: 885
  source 1..75: mol_type = other RNA
ggttccgtggtgtaatggtaagcactctggactctaaacccagcgatccgagttcgagtctcggcggaacctcca

SEQ ID NO: 1648 - RNA, 75 nt, synthetic construct
  misc_feature 1..75: note = Description of sequence: tRNA-based effector molecule; TREM No.: 886
  source 1..75: mol_type = other RNA
ggttccatggtgtaatggtaagcactcttgtctctaaaacaagcgatccgagttcgagtctcggtggaacctcca

SEQ ID NO: 1649 - RNA, 75 nt, synthetic construct
  misc_feature 1..75: note = Description of sequence: tRNA-based effector molecule; TREM No.: 887
  source 1..75: mol_type = other RNA
ggttccatggtgtaatggtaagcactgatacctctaaagtatccgatccgagttcgagtctcggtggaacctcca

SEQ ID NO: 1650 - RNA, 75 nt, synthetic construct
  misc_feature 1..75: note = Description of sequence: tRNA-based effector molecule; TREM No.: 888
  source 1..75: mol_type = other RNA
ggttccatggtgtaatggtaagcactctggactctaaacccagcgatccgagttcgagtctcggtgggacctcca

SEQ ID NO: 1651 - RNA, 75 nt, synthetic construct
  misc_feature 1..75: note = Description of sequence: tRNA-based effector molecule; TREM No.: 889
  source 1..75: mol_type = other RNA
ggttccatggtgtaatggtaagcactccgggctctaaccccggcgatccgagttcgagtctcggtggaacctcca

SEQ ID NO: 1652 - RNA, 75 nt, synthetic construct
  misc_feature 1..75: note = Description of sequence: tRNA-based effector molecule; TREM No.: 890
  source 1..75: mol_type = other RNA
ggttccatggtgtaatggtaagcacttccgtctctaaaacggacgatccgagttcgagtctcggtggaacctcca

SEQ ID NO: 1653 - RNA, 75 nt, synthetic construct
  misc_feature 1..75: note = Description of sequence: tRNA-based effector molecule; TREM No.: 891
  source 1..75: mol_type = other RNA
ggttccatggtgtaatggcaagcactctggtctctaaaaccagcgatccgagttcgagtctcggtggaacctcca

SEQ ID NO: 1654 - RNA, 75 nt, synthetic construct
  misc_feature 1..75: note = Description of sequence: tRNA-based effector molecule; TREM No.: 892
  source 1..75: mol_type = other RNA
ggttccatggtgtaatggtaagcactctggcctctaaatccagcgatccgagttcgagtctcggtggaacctcca

SEQ ID NO: 1655 - RNA, 75 nt, synthetic construct
  misc_feature 1..75: note = Description of sequence: tRNA-based effector molecule; TREM No.: 893
  source 1..75: mol_type = other RNA
ggttccatggtgtaatggtaagcacttgtagctctaaactacacgatccgagttcgagtctcggtggaacctcca

SEQ ID NO: 1656 - RNA, 75 nt, synthetic construct
  misc_feature 1..75: note = Description of sequence: tRNA-based effector molecule; TREM No.: 894
  source 1..75: mol_type = other RNA
ggttccatggtgtaatggtaagcactccggtctctaaatccggcgatccgagttcgagtctcggtggaacctcca

SEQ ID NO: 1657 - RNA, 75 nt, synthetic construct
  misc_feature 1..75: note = Description of sequence: tRNA-based effector molecule; TREM No.: 895
  source 1..75: mol_type = other RNA
ggttcaatggtgtaatggtaagcactctggactctaaacccagcgatccgagttcgagtctcggttgaacctcca

SEQ ID NO: 1658 - RNA, 75 nt, synthetic construct
  misc_feature 1..75: note = Description of sequence: tRNA-based effector molecule; TREM No.: 896
  source 1..75: mol_type = other RNA
ggatccatggtgtaatggtaagcactctggtctctaaaaccagcgatccgagttcgagtctcggtggatcctcca

SEQ ID NO: 1659 - RNA, 75 nt, synthetic construct
  misc_feature 1..75: note = Description of sequence: tRNA-based effector molecule; TREM No.: 897
  source 1..75: mol_type = other RNA
ggttccatggtgtaatggtaagcactctggtctctaaaaccagtgatccgagttcgagtctcggtggaacctcca

SEQ ID NO: 1660 - RNA, 75 nt, synthetic construct
  misc_feature 1..75: note = Description of sequence: tRNA-based effector molecule; TREM No.: 898
  source 1..75: mol_type = other RNA
ggttccatggtgtaatggtaagcactccgatctctaaaatcggcgatccgagttcgagtctcggtggaacctcca

SEQ ID NO: 1661 - RNA, 75 nt, synthetic construct
  misc_feature 1..75: note = Description of sequence: tRNA-based effector molecule; TREM No.: 899
  source 1..75: mol_type = other RNA
ggtcccatggtgtaatggtaagcactctggcctctaaatccagcgatccgagttcgagtctcggtgggacctcca

SEQ ID NO: 1662 - RNA, 75 nt, synthetic construct
  misc_feature 1..75: note = Description of sequence: tRNA-based effector molecule; TREM No.: 900
  source 1..75: mol_type = other RNA
ggttccatggtgtaatggtcagcactctggtctctaaaaccagcgatccgagttcgagtctcggtggaacctcca

SEQ ID NO: 1663 - RNA, 75 nt, synthetic construct
  misc_feature 1..75: note = Description of sequence: tRNA-based effector molecule; TREM No.: 901
  source 1..75: mol_type = other RNA
ggttccatggtgtaatggtaagcactacggtctctaaaaccgtcgatccgagttcgagtctcggtggaacctcca

SEQ ID NO: 1664 - RNA, 75 nt, synthetic construct
  misc_feature 1..75: note = Description of sequence: tRNA-based effector molecule; TREM No.: 902
  source 1..75: mol_type = other RNA
ggttccatggtgtaatggtaagcactctggcctctaaatccagcgatcggagttcgagtctccgtggaacctcca

SEQ ID NO: 1665 - RNA, 75 nt, synthetic construct
  misc_feature 1..75: note = Description of sequence: tRNA-based effector molecule; TREM No.: 903
  source 1..75: mol_type = other RNA
ggttccatggtgtaatggtaagcactcccggctctaacccgggcgatccgagttcgagtctcggtggaacctcca

SEQ ID NO: 1666 - RNA, 75 nt, synthetic construct
  misc_feature 1..75: note = Description of sequence: tRNA-based effector molecule; TREM No.: 904
  source 1..75: mol_type = other RNA
ggttccatggtgtaatggtgagcactctggcctctaaatccagcgatccgagttcgagtctcggtggaacctcca

SEQ ID NO: 1667 - RNA, 75 nt, synthetic construct
  misc_feature 1..75: note = Description of sequence: tRNA-based effector molecule; TREM No.: 905
  source 1..75: mol_type = other RNA
ggttccatggtgtaatggtaagcactctggactctaaacccagcaatccgagttcgagtctcggtggaacctcca

SEQ ID NO: 1668 - RNA, 75 nt, synthetic construct
  misc_feature 1..75: note = Description of sequence: tRNA-based effector molecule; TREM No.: 906
  source 1..75: mol_type = other RNA
ggttccatggtgtaatggtaagcactttggtctctaaaaccagcgatccgagttcgagtctcggtggaacctcca

SEQ ID NO: 1669 - RNA, 75 nt, synthetic construct
  misc_feature 1..75: note = Description of sequence: tRNA-based effector molecule; TREM No.: 907
  source 1..75: mol_type = other RNA
ggttccatggtgtaatggtaagcactaccagctctaaactggtcgatccgagttcgagtctcggtggaacctcca

SEQ ID NO: 1670 - RNA, 75 nt, synthetic construct
  misc_feature 1..75: note = Description of sequence: tRNA-based effector molecule; TREM No.: 908
  source 1..75: mol_type = other RNA
ggttccatggtgtaatggtaagcactcatggctctaaaccatgcgatccgagttcgagtctcggtggaacctcca

SEQ ID NO: 1671 - RNA, 75 nt, synthetic construct
  misc_feature 1..75: note = Description of sequence: tRNA-based effector molecule; TREM No.: 909
  source 1..75: mol_type = other RNA
ggttccatggtgtaatggtaagcactcctaactctaaattaggcgatccgagttcgagtctcggtggaacctcca

SEQ ID NO: 1672 - RNA, 75 nt, synthetic construct
  misc_feature 1..75: note = Description of sequence: tRNA-based effector molecule; TREM No.: 910
  source 1..75: mol_type = other RNA
ggttccatggtgtaatggtaagcacatctaactctaaattagacgatccgagttcgagtctcggtggaacctcca

SEQ ID NO: 1673 - RNA, 75 nt, synthetic construct
  misc_feature 1..75: note = Description of sequence: tRNA-based effector molecule; TREM No.: 911
  source 1..75: mol_type = other RNA
ggttccatggtgtaatggtaagcacttctgactctaaatcagataatccgagttcgagtctcggtggaacctcca

SEQ ID NO: 1674 - RNA, 75 nt, synthetic construct
  misc_feature 1..75: note = Description of sequence: tRNA-based effector molecule; TREM No.: 912
  source 1..75: mol_type = other RNA
ggttccatggtgtaatggtaagcacactggactctaaacccagcgatccgagttcgagtctcggtggaacctcca

SEQ ID NO: 1675 - RNA, 75 nt, synthetic construct
  misc_feature 1..75: note = Description of sequence: tRNA-based effector molecule; TREM No.: 913
  source 1..75: mol_type = other RNA
ggttccatggtgtaatggttagcactctggactctaaacccagcgatccgagttcgagtctcggtggaacctcca

SEQ ID NO: 1676 - RNA, 75 nt, synthetic construct
  misc_feature 1..75: note = Description of sequence: tRNA-based effector molecule; TREM No.: 914
  source 1..75: mol_type = other RNA
ggttccatggtgtaatggtaagcactctggactctaaacccagcgatccgagttcgagtctcggtggagcctcca

SEQ ID NO: 1677 - RNA, 75 nt, synthetic construct
  misc_feature 1..75: note = Description of sequence: tRNA-based effector molecule; TREM No.: 915
  source 1..75: mol_type = other RNA
ggttccatggtgtaatggtaagcactactggctctaaaccagtcgatccgagttcgagtctcggtggaacctcca

SEQ ID NO: 1678 - RNA, 75 nt, synthetic construct
  misc_feature 1..75: note = Description of sequence: tRNA-based effector molecule; TREM No.: 916
  source 1..75: mol_type = other RNA
ggttccatggtgtaatggtaagcactcgggactctaaaccccgcgatccgagttcgagtctcggtggaacctcca

SEQ ID NO: 1679 - RNA, 75 nt, synthetic construct
  misc_feature 1..75: note = Description of sequence: tRNA-based effector molecule; TREM No.: 917
  source 1..75: mol_type = other RNA
ggttccatggtgtaatggtaagcacttctgtctctaaaacagacgatccgagttcgagtctcggtggaacctcca

SEQ ID NO: 1680 - RNA, 75 nt, synthetic construct
  misc_feature 1..75: note = Description of sequence: tRNA-based effector molecule; TREM No.: 918
  source 1..75: mol_type = other RNA
ggttccatggtgtaatggtaagcactccaagctctaaacttggcgatccgagttcgagtctcggtggaacctcca

SEQ ID NO: 1681 - RNA, 75 nt, synthetic construct
  misc_feature 1..75: note = Description of sequence: tRNA-based effector molecule; TREM No.: 919
  source 1..75: mol_type = other RNA
ggttccatggtgtaatggcaagcactctgtactctaaatacagcgatccgagttcgagtctcggtggaacctcca

SEQ ID NO: 1682 - RNA, 75 nt, synthetic construct
  misc_feature 1..75: note = Description of sequence: tRNA-based effector molecule; TREM No.: 920
  source 1..75: mol_type = other RNA
ggttccatggtgtaatggtaagcactactgactctaaatcagtgaatccgagttcgagtctcggtggaacctcca

SEQ ID NO: 1683 - RNA, 75 nt, synthetic construct
  misc_feature 1..75: note = Description of sequence: tRNA-based effector molecule; TREM No.: 921
  source 1..75: mol_type = other RNA
ggttccatggtgtaatggtaagcactccgtcctctaaagacggcgatccgagttcgagtctcggtggaacctcca

SEQ ID NO: 1684 - RNA, 75 nt, synthetic construct
  misc_feature 1..75: note = Description of sequence: tRNA-based effector molecule; TREM No.: 922
  source 1..75: mol_type = other RNA
ggttccatggtgtaatggtaagcactgggacctctaaagtccccgatccgagttcgagtctcggtggaacctcca

SEQ ID NO: 1685 - RNA, 75 nt, synthetic construct
  misc_feature 1..75: note = Description of sequence: tRNA-based effector molecule; TREM No.: 923
  source 1..75: mol_type = other RNA
ggttccatggtgtaatggtaagcacttccatctctaaaatggacgatccgagttcgagtctcggtggaacctcca

SEQ ID NO: 1686 - RNA, 75 nt, synthetic construct
  misc_feature 1..75: note = Description of sequence: tRNA-based effector molecule; TREM No.: 924
  source 1..75: mol_type = other RNA
ggttccatggtgtaatggtaagcactagagcctctaaagctctcgatccgagttcgagtctcggtggaacctcca

SEQ ID NO: 1687 - RNA, 75 nt, synthetic construct
  misc_feature 1..75: note = Description of sequence: tRNA-based effector molecule; TREM No.: 925
  source 1..75: mol_type = other RNA
ggctccatggtgtaatggtaagcactctggactctaaacccagcgatccgagttcgagtctcggtggagcctcca

SEQ ID NO: 1688 - RNA, 75 nt, synthetic construct
  misc_feature 1..75: note = Description of sequence: tRNA-based effector molecule; TREM No.: 926
  source 1..75: mol_type = other RNA
ggatccatggtgtaatggtaagcactctggcctctaaatccagcgatccgagttcgagtctcggtggatcctcca

SEQ ID NO: 1689 - RNA, 75 nt, synthetic construct
  misc_feature 1..75: note = Description of sequence: tRNA-based effector molecule; TREM No.: 927
  source 1..75: mol_type = other RNA
ggttccatggtgtaatggtaagcacttcgtactctaaatacgacgatccgagttcgagtctcggtggaacctcca

SEQ ID NO: 1690 - RNA, 75 nt, synthetic construct
  misc_feature 1..75: note = Description of sequence: tRNA-based effector molecule; TREM No.: 928
  source 1..75: mol_type = other RNA
ggttccatggtgtaatggtaagcacaccttactctaaataaggcgatccgagttcgagtctcggtggaacctcca

SEQ ID NO: 1691 - RNA, 75 nt, synthetic construct
  misc_feature 1..75: note = Description of sequence: tRNA-based effector molecule; TREM No.: 929
  source 1..75: mol_type = other RNA
ggttccatggtgtaatggtaaacactctgacctctaaattcagcgatccgagttcgagtctcggtggaacctcca

SEQ ID NO: 1692 - RNA, 75 nt, synthetic construct
  misc_feature 1..75: note = Description of sequence: tRNA-based effector molecule; TREM No.: 930
  source 1..75: mol_type = other RNA
ggttccatggtgtaatggtaagcactacagtctctaaaactgtcgatccgagttcgagtctcggtggaacctcca

SEQ ID NO: 1693 - RNA, 75 nt, synthetic construct
  misc_feature 1..75: note = Description of sequence: tRNA-based effector molecule; TREM No.: 931
  source 1..75: mol_type = other RNA
ggttccatggtgtaatggtaagcactctggactctaaacccagcgatccgagttcgagtctcggtggaacctcca

SEQ ID NO: 1694 - RNA, 75 nt, synthetic construct
  misc_feature 1..75: note = Description of sequence: tRNA-based effector molecule; TREM No.: 932
  source 1..75: mol_type = other RNA
ggttccatggtgtaatggtaagcactgcgacctctaaagtcgccgatccgagttcgagtctcggtggaacctcca

SEQ ID NO: 1695 - RNA, 75 nt, synthetic construct
  misc_feature 1..75: note = Description of sequence: tRNA-based effector molecule; TREM No.: 933
  source 1..75: mol_type = other RNA
ggttccatggtgtaatggtaagcactccaatctctaaaattggcgatccgagttcgagtctcggtggaacctcca

SEQ ID NO: 1696 - RNA, 75 nt, synthetic construct
  misc_feature 1..75: note = Description of sequence: tRNA-based effector molecule; TREM No.: 934
  source 1..75: mol_type = other RNA
ggttccatggtgtaatggtaagcacttctctctctaaaagagacgatccgagttcgagtctcggtggaacctcca

SEQ ID NO: 1697 - RNA, 75 nt, synthetic construct
  misc_feature 1..75: note = Description of sequence: tRNA-based effector molecule; TREM No.: 935
  source 1..75: mol_type = other RNA
ggttccatggtgtaatggtaagcactacaaactctaaatttgtagatccgagttcgagtctcggtggaacctcca

SEQ ID NO: 1698 - RNA, 75 nt, synthetic construct
  misc_feature 1..75: note = Description of sequence: tRNA-based effector molecule; TREM No.: 936
  source 1..75: mol_type = other RNA
ggttccatggtgtaatggtaagcactaagccctctaaaggcttcgatccgagttcgagtctcggtggaacctcca

SEQ ID NO: 1699 - RNA, 75 nt, synthetic construct
  misc_feature 1..75: note = Description of sequence: tRNA-based effector molecule; TREM No.: 937
  source 1..75: mol_type = other RNA
ggttccatggtgtaatggtaagcactactgcctctaaagcagtcgatccgagttcgagtctcggtggaacctcca

SEQ ID NO: 1700 - RNA, 75 nt, synthetic construct
  misc_feature 1..75: note = Description of sequence: tRNA-based effector molecule; TREM No.: 938
  source 1..75: mol_type = other RNA
ggttccatggtgtaatggtaagcactcctgactctaaatcaggttatccgagttcgagtctcggtggaacctcca

SEQ ID NO: 1701 - RNA, 75 nt, synthetic construct
  misc_feature 1..75: note = Description of sequence: tRNA-based effector molecule; TREM No.: 939
  source 1..75: mol_type = other RNA
ggttccatggtgtaatggtaagcacttatgtctctaaaacatacgatccgagttcgagtctcggtggaacctcca

SEQ ID NO: 1702 - RNA, 75 nt, synthetic construct
  misc_feature 1..75: note = Description of sequence: tRNA-based effector molecule; TREM No.: 940
  source 1..75: mol_type = other RNA
ggttccatggtgtaatggtaagcactactccctctaaaggagtcgatccgagttcgagtctcggtggaacctcca

SEQ ID NO: 1703 - RNA, 75 nt, synthetic construct
  misc_feature 1..75: note = Description of sequence: tRNA-based effector molecule; TREM No.: 941
  source 1..75: mol_type = other RNA
ggttccatggtgtaatggtaagcacactggcctctaaatccagcgatccgagttcgagtctcggtggaacctcca

SEQ ID NO: 1704 - RNA, 75 nt, synthetic construct
  misc_feature 1..75: note = Description of sequence: tRNA-based effector molecule; TREM No.: 942
  source 1..75: mol_type = other RNA
ggttccatggtgtaatggtaagcactccttgctctaaacaaggcgatccgagttcgagtctcggtggaacctcca

SEQ ID NO: 1705 - RNA, 75 nt, synthetic construct
  misc_feature 1..75: note = Description of sequence: tRNA-based effector molecule; TREM No.: 943
  source 1..75: mol_type = other RNA
ggttccatggtgtaatggtaagcactactacctctaaagtagtcgatccgagttcgagtctcggtggaacctcca

SEQ ID NO: 1706 - RNA, 75 nt, synthetic construct
  misc_feature 1..75: note = Description of sequence: tRNA-based effector molecule; TREM No.: 944
  source 1..75: mol_type = other RNA
ggttccatggtgtaatggtgagcactctggactctaaacccagcgatccgagttcgagtctcggtggaacctcca

SEQ ID NO: 1707 - RNA, 75 nt, synthetic construct
  misc_feature 1..75: note = Description of sequence: tRNA-based effector molecule; TREM No.: 945
  source 1..75: mol_type = other RNA
ggttccatggtgtaatggtaagcactctggactctaaacccagcgatccgagttcgagtctcggtggaaccacca

SEQ ID NO: 1708 - RNA, 75 nt, synthetic construct
  misc_feature 1..75: note = Description of sequence: tRNA-based effector molecule; TREM No.: 946
  source 1..75: mol_type = other RNA
ggttccatggtgtaatggtaagcactctcagctctaaactgagcgatccgagttcgagtctcggtggaacctcca

SEQ ID NO: 1709 - RNA, 75 nt, synthetic construct
  misc_feature 1..75: note = Description of sequence: tRNA-based effector molecule; TREM No.: 947
  source 1..75: mol_type = other RNA
ggttccatggtgtaatggtaagcactcatgactctaaatcatgaaatccgagttcgagtctcggtggaacctcca

SEQ ID NO: 1710 - RNA, 75 nt, synthetic construct
  misc_feature 1..75: note = Description of sequence: tRNA-based effector molecule; TREM No.: 948
  source 1..75: mol_type = other RNA
ggttccatggtgtaatggtaagcacttctatctctaaaatagacgatccgagttcgagtctcggtggaacctcca

SEQ ID NO: 1711 - RNA, 75 nt, synthetic construct
  misc_feature 1..75: note = Description of sequence: tRNA-based effector molecule; TREM No.: 949
  source 1..75: mol_type = other RNA
ggttccatggtgtaatggtaagcactcgaagctctaaacttcgcgatccgagttcgagtctcggtggaacctcca

SEQ ID NO: 1712 - RNA, 75 nt, synthetic construct
  misc_feature 1..75: note = Description of sequence: tRNA-based effector molecule; TREM No.: 950
  source 1..75: mol_type = other RNA
ggttccatggtgtaatggtaagcactggtatctctaaaatacccgatccgagttcgagtctcggtggaacctcca

SEQ ID NO: 1713 - RNA, 75 nt, synthetic construct
  misc_feature 1..75: note = Description of sequence: tRNA-based effector molecule; TREM No.: 951
  source 1..75: mol_type = other RNA
ggttccatggtgtaatggtaagcactccgatctcaaaaatcggcgatccaagttcgagtcttggtggaacctcca

SEQ ID NO: 1714 - RNA, 75 nt, synthetic construct
  misc_feature 1..75: note = Description of sequence: tRNA-based effector molecule; TREM No.: 952
  source 1..75: mol_type = other RNA
ggttccatggtgtaatggtaagcacaagtgactctaaatcactcgatccgagttcgagtctcggtggaacctcca

SEQ ID NO: 1715 - RNA, 75 nt, synthetic construct
  misc_feature 1..75: note = Description of sequence: tRNA-based effector molecule; TREM No.: 953
  source 1..75: mol_type = other RNA
ggttccatggtgtaatggtaagcacttatgactctaaatcatatgatccgagttcgagtctcggtggaacctcca

SEQ ID NO: 1716 - RNA, 75 nt, synthetic construct
  misc_feature 1..75: note = Description of sequence: tRNA-based effector molecule; TREM No.: 954
  source 1..75: mol_type = other RNA
ggttccatggtgtaatggtaagcactttcagctctaaactgaacgatccgagttcgagtctcggtggaacctcca

SEQ ID NO: 1717 - RNA, 75 nt, synthetic construct
  misc_feature 1..75: note = Description of sequence: tRNA-based effector molecule; TREM No.: 955
  source 1..75: mol_type = other RNA
ggttccatggtgtaatggtaagcactctggactctaaacccagcgatccgagttcgagcctcggtggaacctcca

SEQ ID NO: 1718 - RNA, 75 nt, synthetic construct
  misc_feature 1..75: note = Description of sequence: tRNA-based effector molecule; TREM No.: 956
  source 1..75: mol_type = other RNA
ggttccatggtgtaatggtaagcactccaacctctaaagttggcgatccgagttcgagtctcggtggaacctcca

SEQ ID NO: 1719 - RNA, 75 nt, synthetic construct
  misc_feature 1..75: note = Description of sequence: tRNA-based effector molecule; TREM No.: 957
  source 1..75: mol_type = other RNA
ggttccatggtgtaatggtaagcactctggtctctaaatccagcgatccgagttcgaatctcggtggaacctcca

SEQ ID NO: 1720 - RNA, 75 nt, synthetic construct
  misc_feature 1..75: note = Description of sequence: tRNA-based effector molecule; TREM No.: 958
  source 1..75: mol_type = other RNA
ggttccatggtgtaatggtaagcactcctgactctaaatccggcgatccgagttcgagtctcggtggaacctcca

SEQ ID NO: 1721 - RNA, 75 nt, synthetic construct
  misc_feature 1..75: note = Description of sequence: tRNA-based effector molecule; TREM No.: 959
  source 1..75: mol_type = other RNA
ggttccatggtgtaatggtaagcactcagaactctaaattctgtgatccgagttcgagtctcggtggaacctcca

SEQ ID NO: 1722 - RNA, 75 nt, synthetic construct
  misc_feature 1..75: note = Description of sequence: tRNA-based effector molecule; TREM No.: 960
  source 1..75: mol_type = other RNA
ggttccatggtgtaatggtaagcactgctctctctaaaagagccgatccgagttcgagtctcggtggaacctcca

SEQ ID NO: 1723 - RNA, 75 nt, synthetic construct
  misc_feature 1..75: note = Description of sequence: tRNA-based effector molecule; TREM No.: 961
  source 1..75: mol_type = other RNA
ggttcgatggtgtaatggtaagcactctggactctaaacccagcgatccgagttcgagtctcggtcgaacctcca

SEQ ID NO: 1724 - RNA, 75 nt, synthetic construct
  misc_feature 1..75: note = Description of sequence: tRNA-based effector molecule; TREM No.: 962
  source 1..75: mol_type = other RNA
ggttccatggtgtaatggtaagcactccgatctctaaaatcggcgaccagagttcgagtctctgtggaacctcca

SEQ ID NO: 1725 - RNA, 75 nt, synthetic construct
  misc_feature 1..75: note = Description of sequence: tRNA-based effector molecule; TREM No.: 963
  source 1..75: mol_type = other RNA
ggtaccatggtgtaatggtaagcactctggcctctaaatccagcgatccgagttcgagtctcggtggtacctcca

SEQ ID NO: 1726 - RNA, 75 nt, synthetic construct
  misc_feature 1..75: note = Description of sequence: tRNA-based effector molecule; TREM No.: 964
  source 1..75: mol_type = other RNA
ggatcaatggtgtaatggtaagcactctggcctctaaatccagcgatccgagttcgagtctcggttgatcctcca

SEQ ID NO: 1727 - RNA, 75 nt, synthetic construct
  misc_feature 1..75: note = Description of sequence: tRNA-based effector molecule; TREM No.: 965
  source 1..75: mol_type = other RNA
ggttccttggtgtaatggtaagcactgcgatctctaaaatcgccgatccgagttcgagtctcggaggaacctcca

SEQ ID NO: 1728 - RNA, 75 nt, synthetic construct
  misc_feature 1..75: note = Description of sequence: tRNA-based effector molecule; TREM No.: 966
  source 1..75: mol_type = other RNA
ggttccatggcgtaatggtaagcgctctggactctaaatccagcgatccgagttcgagtctcggtggaaccccca

SEQ ID NO: 1729 - RNA, 75 nt, synthetic construct
  misc_feature 1..75: note = Description of sequence: tRNA-based effector molecule; TREM No.: 967
  source 1..75: mol_type = other RNA
ggtaccatggtgtaatggtaagcactccggtctctaaaaccggcgatccgagttcgagtctcggtggtacctcca

SEQ ID NO: 1730 - RNA, 75 nt, synthetic construct
  misc_feature 1..75: note = Description of sequence: tRNA-based effector molecule; TREM No.: 968
  source 1..75: mol_type = other RNA
ggttccatggtgtaatggtaagcacttcggcctctaaagccgacgatccgagttcgagtctcggtggaacctcca

SEQ ID NO: 1731 - RNA, 75 nt, synthetic construct
  misc_feature 1..75: note = Description of sequence: tRNA-based effector molecule; TREM No.: 969
  source 1..75: mol_type = other RNA
ggttccatggtgtaatggtaagcacttcgacctctaaagtcgacgatccgagttcgagtctcggtggaacctcca

SEQ ID NO: 1732 - RNA, 75 nt, synthetic construct
  misc_feature 1..75: note = Description of sequence: tRNA-based effector molecule; TREM No.: 970
  source 1..75: mol_type = other RNA
ggttccatggtgtaatggtaagcactgctaactctaaattagctgatccgagttcgagtctcggtggaacctcca

SEQ ID NO: 1733 - RNA, 75 nt, synthetic construct
  misc_feature 1..75: note = Description of sequence: tRNA-based effector molecule; TREM No.: 971
  source 1..75: mol_type = other RNA
ggttccatggtgtaatggtaagcactctgaactctaaattcggcgatccgagttcgagtctcggtggaacctcca

SEQ ID NO: 1734 - RNA, 75 nt, synthetic construct
  misc_feature 1..75: note = Description of sequence: tRNA-based effector molecule; TREM No.: 972
  source 1..75: mol_type = other RNA
ggttccatggtgtaatggtaagcactactgactctaaatcagtggatccgagttcgagtctcggtggaacctcca

SEQ ID NO: 1735 - RNA, 75 nt, synthetic construct
  misc_feature 1..75: note = Description of sequence: tRNA-based effector molecule; TREM No.: 973
  source 1..75: mol_type = other RNA
ggttccatggtgtaatggtaagcacttgcgtctctaaaacgcacgatccgagttcgagtctcggtggaacctcca

SEQ ID NO: 1736 - RNA, 75 nt, synthetic construct
  misc_feature 1..75: note = Description of sequence: tRNA-based effector molecule; TREM No.: 974
  source 1..75: mol_type = other RNA
ggttccatggtgtaatggtaagcactactctctctaaaagagtcgatccgagttcgagtctcggtggaacctcca

SEQ ID NO: 1737 - RNA, 75 nt, synthetic construct
  misc_feature 1..75: note = Description of sequence: tRNA-based effector molecule; TREM No.: 975
  source 1..75: mol_type = other RNA
ggttccatggtgtaatggtaagcactgatggctctaaaccatccgatccgagttcgagtctcggtggaacctcca

SEQ ID NO: 1738 - RNA, 75 nt, synthetic construct
  misc_feature 1..75: note = Description of sequence: tRNA-based effector molecule; TREM No.: 976
  source 1..75: mol_type = other RNA
ggttccatggtgtaatggtaagcactgatagctctaaactatccgatccgagttcgagtctcggtggaacctcca

SEQ ID NO: 1739 - RNA, 75 nt, synthetic construct
  misc_feature 1..75: note = Description of sequence: tRNA-based effector molecule; TREM No.: 977
  source 1..75: mol_type = other RNA
ggttccatggtgtaatggtaagcacttctcactctaaatgagacgatccgagttcgagtctcggtggaacctcca

SEQ ID NO: 1740 - RNA, 75 nt, synthetic construct
  misc_feature 1..75: note = Description of sequence: tRNA-based effector molecule; TREM No.: 978
  source 1..75: mol_type = other RNA
ggttccatggtgtaatggtaagcacttcaaactctaaatttgaagatccgagttcgagtctcggtggaacctcca

SEQ ID NO: 1741 - RNA, 75 nt, synthetic construct
  misc_feature 1..75: note = Description of sequence: tRNA-based effector molecule; TREM No.: 979
  source 1..75: mol_type = other RNA
ggttccatggtgtaatggtaagcacacccaactctaaattgggcgatccgagttcgagtctcggtggaacctcca

SEQ ID NO: 1742 - RNA, 75 nt, synthetic construct
  misc_feature 1..75: note = Description of sequence: tRNA-based effector molecule; TREM No.: 980
  source 1..75: mol_type = other RNA
ggttccatggtgtaatggtaagcactctggtctctaaatccggcgatccgagttcgagtctcggtggaacctcca

SEQ ID NO: 1743 - RNA, 75 nt, synthetic construct
  misc_feature 1..75: note = Description of sequence: tRNA-based effector molecule; TREM No.: 981
  source 1..75: mol_type = other RNA
ggttccatggtgtaatggtaagcactctagcctctaaatctagcgatccgagttcgagtctcggtggaacctcca

SEQ ID NO: 1744 - RNA, 75 nt, synthetic construct
  misc_feature 1..75: note = Description of sequence: tRNA-based effector molecule; TREM No.: 982
  source 1..75: mol_type = other RNA
gatcccatggtgtaatggtaagcactccgatctctaaaatcggcgatccgagttcgagtctcggtgggatctcca

SEQ ID NO: 1745 - RNA, 75 nt, synthetic construct
  misc_feature 1..75: note = Description of sequence: tRNA-based effector molecule; TREM No.: 983
  source 1..75: mol_type = other RNA
ggttccatggtgtaatggtaagcacaccgaactctaaattcggcgatccgagttcgagtctcggtggaacctcca

SEQ ID NO: 1746 - RNA, 75 nt, synthetic construct
  misc_feature 1..75: note = Description of sequence: tRNA-based effector molecule; TREM No.: 984
  source 1..75: mol_type = other RNA
ggtaccatggtgtaatggtaagcactccgatctctaaaatcggcgattcgagttcgagtctcgatggtacctcca

SEQ ID NO: 1747 - RNA, 75 nt, synthetic construct
  misc_feature 1..75: note = Description of sequence: tRNA-based effector molecule; TREM No.: 985
  source 1..75: mol_type = other RNA
ggttccttggtgtaatggtaagcactctggtctctaaaaccagcgatccgagttcgagtctcggaggaacctcca

SEQ ID NO: 1748 - RNA, 75 nt, synthetic construct
  misc_feature 1..75: note = Description of sequence: tRNA-based effector molecule; TREM No.: 986
  source 1..75: mol_type = other RNA
ggttccatggtgtaatggtaagcactttcgtctctaaaacgaacgatccgagttcgagtctcggtggaacctcca

SEQ ID NO: 1749 - RNA, 75 nt, synthetic construct
  misc_feature 1..75: note = Description of sequence: tRNA-based effector molecule; TREM No.: 987
  source 1..75: mol_type = other RNA
ggttccatggtgtaatggtaagcacatcgtactctaaatacgacgatccgagttcgagtctcggtggaacctcca

SEQ ID NO: 1750 - RNA, 75 nt, synthetic construct
  misc_feature 1..75: note = Description of sequence: tRNA-based effector molecule; TREM No.: 988
  source 1..75: mol_type = other RNA
ggttccatggtgtaatggtaagcactcctgactctaaatcagggtatccgagttcgagtctcggtggaacctcca

SEQ ID NO: 1751 - RNA, 75 nt, synthetic construct
  misc_feature 1..75: note = Description of sequence: tRNA-based effector molecule; TREM No.: 989
  source 1..75: mol_type = other RNA
ggctccatggtgtaatggtaagcactccgatctctaaaatcggcgatgcgagttcgagtctcgctggagcctcca

SEQ ID NO: 1752 - RNA, 75 nt, synthetic construct
  misc_feature 1..75: note = Description of sequence: tRNA-based effector molecule; TREM No.: 990
  source 1..75: mol_type = other RNA
ggttccatggtgtaatggtaagcactcacacctctaaagtgtgcgatccgagttcgagtctcggtggaacctcca

SEQ ID NO: 1753 - RNA, 75 nt, synthetic construct
  misc_feature 1..75: note = Description of sequence: tRNA-based effector molecule; TREM No.: 991
  source 1..75: mol_type = other RNA
ggttccatggtgtaatggtaagcactctgtactctaaatacagcgatccgagttcgagtctcggtggaacctcca

SEQ ID NO: 1754 - RNA, 75 nt, synthetic construct
  misc_feature 1..75: note = Description of sequence: tRNA-based effector molecule; TREM No.: 992
  source 1..75: mol_type = other RNA
ggatccatggtgtaatggtaagcactcttgactctaaatcaagcgatccgagttcgagtctcggtggatcctcca

SEQ ID NO: 1755 - RNA, 75 nt, synthetic construct
  misc_feature 1..75: note = Description of sequence: tRNA-based effector molecule; TREM No.: 993
  source 1..75: mol_type = other RNA
ggttccgtggtgtaatggtaagcactcttgactctaaatcaagcgatccgagttcgagtctcggcggaacctcca

SEQ ID NO: 1756 - RNA, 75 nt, synthetic construct
  misc_feature 1..75: note = Description of sequence: tRNA-based effector molecule; TREM No.: 994
  source 1..75: mol_type = other RNA
ggttccatggtgtaatggtaagcacaagtaactctaaattactcgatccgagttcgagtctcggtggaacctcca

SEQ ID NO: 1757 - RNA, 75 nt, synthetic construct
  misc_feature 1..75: note = Description of sequence: tRNA-based effector molecule; TREM No.: 995
  source 1..75: mol_type = other RNA
ggttccatggtgtaatggtaagcactcacagctctaacctgtgcgatccgagttcgagtctcggtggaacctcca

SEQ ID NO: 1758 - RNA, 75 nt, synthetic construct
  misc_feature 1..75: note = Description of sequence: tRNA-based effector molecule; TREM No.: 996
  source 1..75: mol_type = other RNA
ggtcccatggtgtaatggtaagcactccgatctctaaaatcggcgatccgagttcgagcctcggtgggacctcca

SEQ ID NO: 1759 - RNA, 75 nt, synthetic construct
  misc_feature 1..75: note = Description of sequence: tRNA-based effector molecule; TREM No.: 997
  source 1..75: mol_type = other RNA
ggttccatggtgtaatggtaagcactctggcctctaaatccagagatccgagttcgagtctcggtggaacctcca

SEQ ID NO: 1760 - RNA, 75 nt, synthetic construct
  misc_feature 1..75: note = Description of sequence: tRNA-based effector molecule; TREM No.: 998
  source 1..75: mol_type = other RNA
ggttccatggtggaatggtaaccactctggcctctaaatccagcgatccgagatcgagtctcggtggaacctcca

SEQ ID NO: 1761 - RNA, 75 nt, synthetic construct
  misc_feature 1..75: note = Description of sequence: tRNA-based effector molecule; TREM No.: 999
  source 1..75: mol_type = other RNA
ggttccatggtgtaatggtaagcactctgtactctaaatacagcgatccgagttcgagtctcggtgggacctcca

SEQ ID NO: 1762 - RNA, 75 nt, synthetic construct
  misc_feature 1..75: note = Description of sequence: tRNA-based effector molecule; TREM No.: 1000
  source 1..75: mol_type = other RNA
ggttccatggtgtaatggtaagcactagttactctaaataactagatccgagttcgagtctcggtggaacctcca

SEQ ID NO: 1763 - RNA, 75 nt, synthetic construct
  misc_feature 1..75: note = Description of sequence: tRNA-based effector molecule; TREM No.: 1001
  source 1..75: mol_type = other RNA
ggttccatggtgtaatggtaagcactccggcctctaaagccggcgatccgagttcgagtctcggtggaacctcca

SEQ ID NO: 1764 - RNA, 75 nt, synthetic construct
  misc_feature 1..75: note = Description of sequence: tRNA-based effector molecule; TREM No.: 1002
  source 1..75: mol_type = other RNA
ggttctgtggtgtaatggtaagcactccgatctctaaaatcggcgatccgagttcgagtctcggcagaacctcca

SEQ ID NO: 1765 - RNA, 75 nt, synthetic construct
  misc_feature 1..75: note = Description of sequence: tRNA-based effector molecule; TREM No.: 1003
  source 1..75: mol_type = other RNA
ggttccatggtgtaatggtaagcacatgatactctaaatatcacgatccgagttcgagtctcggtggaacctcca

SEQ ID NO: 1766 - RNA, 75 nt, synthetic construct
  misc_feature 1..75: note = Description of sequence: tRNA-based effector molecule; TREM No.: 1004
  source 1..75: mol_type = other RNA
ggttccatggtgtaatggtaagcactctaggctctaaccctagcgatccgagttcgagtctcggtggaacctcca

SEQ ID NO: 1767 - RNA, 75 nt, synthetic construct
  misc_feature 1..75: note = Description of sequence: tRNA-based effector molecule; TREM No.: 1005
  source 1..75: mol_type = other RNA
ggttccatggtgtaatggtaagcactcagacctctaaagtctgcgatccgagttcgagtctcggtggaacctcca

SEQ ID NO: 1768 - RNA, 75 nt, synthetic construct
  misc_feature 1..75: note = Description of sequence: tRNA-based effector molecule; TREM No.: 1006
  source 1..75: mol_type = other RNA
ggtgccatggtgtaatggtaagcactctggcctctaaatccagcgatccgagttcgagcctcggtggcacctcca

SEQ ID NO: 1769 - RNA, 75 nt, synthetic construct
  misc_feature 1..75: note = Description of sequence: tRNA-based effector molecule; TREM No.: 1007
  source 1..75: mol_type = other RNA
ggtgccatggtgtaatggtaagcactccggcctctaaatccggcgatccgagttcgagtctcggtggcacctcca

SEQ ID NO: 1770 - RNA, 75 nt, synthetic construct
  misc_feature 1..75: note = Description of sequence: tRNA-based effector molecule; TREM No.: 1008
  source 1..75: mol_type = other RNA
ggttccatggtgtaatggtaagcactccgatctctaaaatcgggtatccgagttcgagtctcggtggaacctcca

SEQ ID NO: 1771 - RNA, 75 nt, synthetic construct
  misc_feature 1..75: note = Description of sequence: tRNA-based effector molecule; TREM No.: 1009
  source 1..75: mol_type = other RNA
gggtccatggtgtaatggtaagcactctggcctctaaatccagcgatccgagttcgagtctcggtggacccacca

SEQ ID NO: 1772 - RNA, 75 nt, synthetic construct
  misc_feature 1..75: note = Description of sequence: tRNA-based effector molecule; TREM No.: 1010
  source 1..75: mol_type = other RNA
ggttccatggttagttggtaataactctggactctaaatccagcgatccgagttcgagtctcggtggaacctcca

SEQ ID NO: 1773 - RNA, 75 nt, synthetic construct
  misc_feature 1..75: note = Description of sequence: tRNA-based effector molecule; TREM No.: 1011
  source 1..75: mol_type = other RNA
ggttccatggtgtaatggtaagcactctggtctctaaaaccagcgatccgagttcgaatctcggtggaacctcca

SEQ ID NO: 1774 - RNA, 75 nt, synthetic construct
  misc_feature 1..75: note = Description of sequence: tRNA-based effector molecule; TREM No.: 1012
  source 1..75: mol_type = other RNA
ggttccatggtgtaatggtaagcactttagactctaaatctaacgatccgagttcgagtctcggtggaacctcca

SEQ ID NO: 1775 - RNA, 75 nt, synthetic construct
  misc_feature 1..75: note = Description of sequence: tRNA-based effector molecule; TREM No.: 1013
  source 1..75: mol_type = other RNA
ggtactatggtgtaatggtaagcactccgatctctaaaatcggcgatccgagttcgagtctcggtagtacctcca

SEQ ID NO: 1776 - RNA, 75 nt, synthetic construct
  misc_feature 1..75: note = Description of sequence: tRNA-based effector molecule; TREM No.: 1014
  source 1..75: mol_type = other RNA
ggttccatggtgtaatggtaagcactccgatctctaaaatcggcgatccgagattgagtctcggtggaacctcca

SEQ ID NO: 1777 - RNA, 75 nt, synthetic construct
  misc_feature 1..75: note = Description of sequence: tRNA-based effector molecule; TREM No.: 1015
  source 1..75: mol_type = other RNA
ggttccatggtgtaatggtaagcactcgcggctctaacccgcgcgatccgagttcgagtctcggtggaacctcca

SEQ ID NO: 1778 - RNA, 75 nt, synthetic construct
  misc_feature 1..75: note = Description of sequence: tRNA-based effector molecule; TREM No.: 1016
  source 1..75: mol_type = other RNA
ggttccatggtgtaatggtaagcacttgatactctaaatatcatgatccgagttcgagtctcggtggaacctcca

SEQ ID NO: 1779 - RNA, 75 nt, synthetic construct
  misc_feature 1..75: note = Description of sequence: tRNA-based effector molecule; TREM No.: 1017
  source 1..75: mol_type = other RNA
ggttccatggtgtaatggtaagcactgtggcctctaaatccacctatccgagttcgagtctcggtggaacctcca

SEQ ID NO: 1780 - RNA, 75 nt, synthetic construct
  misc_feature 1..75: note = Description of sequence: tRNA-based effector molecule; TREM No.: 1018
  source 1..75: mol_type = other RNA
ggttcagtggtgtaatggtaagcactccgatctctaaaatcggcgatccgagttcgagtctcggctgaacctcca

SEQ ID NO: 1781 - RNA, 75 nt, synthetic construct
  misc_feature 1..75: note = Description of sequence: tRNA-based effector molecule; TREM No.: 1019
  source 1..75: mol_type = other RNA
ggttccatggtgtaatggtaagcactctggcctctaaatccagcgatccaaattcgagttttggtggaacctcca

SEQ ID NO: 1782 - RNA, 75 nt, synthetic construct
  misc_feature 1..75: note = Description of sequence: tRNA-based effector molecule; TREM No.: 1020
  source 1..75: mol_type = other RNA
ggttccatggtgtaatggtaagcactttggtctctaaatccaacgatccgagttcgagtctcggtggaacctcca

SEQ ID NO: 1783 - RNA, 75 nt, synthetic construct
  misc_feature 1..75: note = Description of sequence: tRNA-based effector molecule; TREM No.: 1021
  source 1..75: mol_type = other RNA
ggttccatggtgtaatggtaagcacttgtacctctaaagtacacgatccgagttcgagtctcggtggaacctcca

SEQ ID NO: 1784 - RNA, 75 nt, synthetic construct
  misc_feature 1..75: note = Description of sequence: tRNA-based effector molecule; TREM No.: 1022
  source 1..75: mol_type = other RNA
ggttccatggtgtaatggtaagcactctggttcggaaaaccagcgatccgagttcgagtctcggtggaacctcca

SEQ ID NO: 1785 - RNA, 75 nt, synthetic construct
  misc_feature 1..75: note = Description of sequence: tRNA-based effector molecule; TREM No.: 1023
  source 1..75: mol_type = other RNA
ggttccatggtgtaatggtaagcacttatagctctaaactatacgatccgagttcgagtctcggtggaacctcca

SEQ ID NO: 1786 - RNA, 75 nt, synthetic construct
  misc_feature 1..75: note = Description of sequence: tRNA-based effector molecule; TREM No.: 1024
  source 1..75: mol_type = other RNA
ggttccattcgccaatggtaaggcgtctggactctaaatccagcgatccgagttcgagtctcggtggaacctcca

SEQ ID NO: 1787 - RNA, 75 nt, synthetic construct
  misc_feature 1..75: note = Description of sequence: tRNA-based effector molecule; TREM No.: 1025
  source 1..75: mol_type = other RNA
ggttccatggtgtaatggtaagcacttaccactctaaatggtaggatccgagttcgagtctcggtggaacctcca

SEQ ID NO: 1788 - RNA, 75 nt, synthetic construct
  misc_feature 1..75: note = Description of sequence: tRNA-based effector molecule; TREM No.: 1026
  source 1..75: mol_type = other RNA
ggttccatggtgtaatggtaaacactctggactctaaatccagggatccgagttcgagtctcggtggaacctcca

SEQ ID NO: 1789 - RNA, 75 nt, synthetic construct
  misc_feature 1..75: note = Description of sequence: tRNA-based effector molecule; TREM No.: 1027
  source 1..75: mol_type = other RNA
ggttccatggtgtaatggaaagcactccgatctctaaaatcggcgatccgagtccgagtctcggtggaacctcca

SEQ ID NO: 1790 - RNA, 75 nt, synthetic construct
  misc_feature 1..75: note = Description of sequence: tRNA-based effector molecule; TREM No.: 1028
  source 1..75: mol_type = other RNA
ggtttcatggtgtaatggtaagcactctggtctctaaaaccagcgatccgagttcgagtctcggtgaaacctcca

SEQ ID NO: 1791 - RNA, 75 nt, synthetic construct
  misc_feature 1..75: note = Description of sequence: tRNA-based effector molecule; TREM No.: 1029
  source 1..75: mol_type = other RNA
ggttccatggtgtaatggtaagcactctggactctaactccagcgatgcgagttcgagtctcgctggaacctcca

SEQ ID NO: 1792 - RNA, 75 nt, synthetic construct
  misc_feature 1..75: note = Description of sequence: tRNA-based effector molecule; TREM No.: 1030
  source 1..75: mol_type = other RNA
ggttccatggtgtaatggtaagcactccgatctctaaaatcggtgatccgagttcgagtctcggtggaacctcca

SEQ ID NO: 1793 - RNA, 75 nt, synthetic construct
  misc_feature 1..75: note = Description of sequence: tRNA-based effector molecule; TREM No.: 1031
  source 1..75: mol_type = other RNA
ggttccatggtgtaatggtaagcactgccctctctaaaagggccgatccgagttcgagtctcggtggaacctcca

SEQ ID NO: 1794 - RNA, 75 nt, synthetic construct
  misc_feature 1..75: note = Description of sequence: tRNA-based effector molecule; TREM No.: 1032
  source 1..75: mol_type = other RNA
ggttccatggtgtaatggtaagcactagggactctaaatccctgcgtccgagttcgagtctcggtggaacctcca

SEQ ID NO: 1795 - RNA, 75 nt, synthetic construct
  misc_feature 1..75: note = Description of sequence: tRNA-based effector molecule; TREM No.: 1033
  source 1..75: mol_type = other RNA
ggttccatggtgtaacggttagcactctggcctctaaatccagcgatccgagttcgagtctcggtggaacctcca

SEQ ID NO: 1796 - RNA, 75 nt, synthetic construct
  misc_feature 1..75: note = Description of sequence: tRNA-based effector molecule; TREM No.: 1034
  source 1..75: mol_type = other RNA
ggtaccatggtgtaatggtaagcactctgaactctaaattcagcgatccgagttcgagtctcggtggtacctcca

SEQ ID NO: 1797 - RNA, 75 nt, synthetic construct
  misc_feature 1..75: note = Description of sequence: tRNA-based effector molecule; TREM No.: 1035
  source 1..75: mol_type = other RNA
ggttccatggtgtaatggtaagcactagtacctctaaagtactcgatccgagttcgagtctcggtggaacctcca

SEQ ID NO: 1798 - RNA, 75 nt, synthetic construct
  misc_feature 1..75: note = Description of sequence: tRNA-based effector molecule; TREM No.: 1036
  source 1..75: mol_type = other RNA
ggttccatggtgtaatggtaagcactcttagctctaacctaagcgatccgagttcgagtctcggtggaacctcca

SEQ ID NO: 1799 - RNA, 75 nt, synthetic construct
  misc_feature 1..75: note = Description of sequence: tRNA-based effector molecule; TREM No.: 1037
  source 1..75: mol_type = other RNA
ggttccaaggtgtaacggtaagcactccgatctctaaaatcggcgatccgagttcgagtctcggtggaacctcca

SEQ ID NO: 1800 - RNA, 75 nt, synthetic construct
  misc_feature 1..75: note = Description of sequence: tRNA-based effector molecule; TREM No.: 1038
  source 1..75: mol_type = other RNA
ggttccatggggtaatggtaagccccagggactctaaatccctcgatccgagttcgagtctcggtggaacctcca

SEQ ID NO: 1801 - RNA, 75 nt, synthetic construct
  misc_feature 1..75: note = Description of sequence: tRNA-based effector molecule; TREM No.: 1039
  source 1..75: mol_type = other RNA
ggttccatggtgtaatggtaagcactattgtctctaaaacaatcgatccgagttcgagtctcggtggaacctcca

SEQ ID NO: 1802 - RNA, 75 nt, synthetic construct
  misc_feature 1..75: note = Description of sequence: tRNA-based effector molecule; TREM No.: 1040
  source 1..75: mol_type = other RNA
ggttccatggtgtaatggtaagcactccgatctcgaaaatcggcgatccgatttcgagtatcggtggaacctcca

SEQ ID NO: 1803 - RNA, 75 nt, synthetic construct
  misc_feature 1..75: note = Description of sequence: tRNA-based effector molecule; TREM No.: 1041
  source 1..75: mol_type = other RNA
ggttccatggtgtaatggtaagcactctgatctctaaaatcagcgacccgagttcgagtctcggtggaacctcca

SEQ ID NO: 1804 - RNA, 75 nt, synthetic construct
  misc_feature 1..75: note = Description of sequence: tRNA-based effector molecule; TREM No.: 1042
  source 1..75: mol_type = other RNA
ggttccatggagtaatggtaagctctctggactctaaatccagcgatccgagttcgggtctcggtggaacctcca

SEQ ID NO: 1805 - RNA, 75 nt, synthetic construct
  misc_feature 1..75: note = Description of sequence: tRNA-based effector molecule; TREM No.: 1043
  source 1..75: mol_type = other RNA
ggttccatggtgtaatggtgagcactctgaactctaaattcagcgatccgagttcgagtctcggtggaacctcca

SEQ ID NO: 1806 - RNA, 75 nt, synthetic construct
  misc_feature 1..75: note = Description of sequence: tRNA-based effector molecule; TREM No.: 1044
  source 1..75: mol_type = other RNA
ggttccatggtgtaatggtaagcactccgatctgtaaaatcggcgatccgtgttcgagtcacggtggaacctcca

SEQ ID NO: 1807 - RNA, 75 nt, synthetic construct
  misc_feature 1..75: note = Description of sequence: tRNA-based effector molecule; TREM No.: 1045
  source 1..75: mol_type = other RNA
ggttccatggtgtaatggtaagcactgcggcctctaaagccgccgatccgagttcgagtctcggtggaacctcca

SEQ ID NO: 1808 - RNA, 75 nt, synthetic construct
  misc_feature 1..75: note = Description of sequence: tRNA-based effector molecule; TREM No.: 1046
  source 1..75: mol_type = other RNA
ggagccatggtgtaatggtaagcactctggcctctaaatccagcgatccgagttcgagtctcggtggctcctcca

SEQ ID NO: 1809 - RNA, 75 nt, synthetic construct
  misc_feature 1..75: note = Description of sequence: tRNA-based effector molecule; TREM No.: 1047
  source 1..75: mol_type = other RNA
ggttccatgacataatggtaagtgttctggactctaaatccagcgatccgagttcgagtctcggtggaacctcca

SEQ ID NO: 1810 - RNA, 75 nt, synthetic construct
  misc_feature 1..75: note = Description of sequence: tRNA-based effector molecule; TREM No.: 1048
  source 1..75: mol_type = other RNA
ggttccatggtgttatgctaagcactctggcctctaaatccagcgatccgagttcgagtctcggtggaacctcca

SEQ ID NO: 1811 - RNA, 75 nt, synthetic construct
  misc_feature 1..75: note = Description of sequence: tRNA-based effector molecule; TREM No.: 1049
  source 1..75: mol_type = other RNA
ggttccatggtgtaatggtaagcactctggcctctaaatccagcgatccgagttcgaggctcggtggaaccgcca

SEQ ID NO: 1812 - RNA, 75 nt, synthetic construct
  misc_feature 1..75: note = Description of sequence: tRNA-based effector molecule; TREM No.: 1050
  source 1..75: mol_type = other RNA
ggttccatggtgtaatcgtaagcactctggcctctaaatccagcgatcccagttcgagtctgggtggaacctcca

SEQ ID NO: 1813 - RNA, 75 nt, synthetic construct
  misc_feature 1..75: note = Description of sequence: tRNA-based effector molecule; TREM No.: 1051
  source 1..75: mol_type = other RNA
ggttccatggtgtaatggtaagcactctggactctaaatccagcgatccgagttcgagtctcggtggaaccgcca

SEQ ID NO: 1814 - RNA, 75 nt, synthetic construct
  misc_feature 1..75: note = Description of sequence: tRNA-based effector molecule; TREM No.: 1052
  source 1..75: mol_type = other RNA
ggttccatggtgtaaaggtaagcactctggcctctaaatccagcgatccgagttcgagtctcggtggaacctcca

SEQ ID NO: 1815 - RNA, 75 nt, synthetic construct
  misc_feature 1..75: note = Description of sequence: tRNA-based effector molecule; TREM No.: 1053
  source 1..75: mol_type = other RNA
ggttccatggtgtaatggtacgcaccctggcctctaaatccagcgatccgagttcgagtctcggtggaacctcca

SEQ ID NO: 1816 - RNA, 75 nt, synthetic construct
  misc_feature 1..75: note = Description of sequence: tRNA-based effector molecule; TREM No.: 1054
  source 1..75: mol_type = other RNA
ggttccatggtgtaatggtatacactctggcctctaaatccagcgatccgagttcgagtctcggtggaacctcca

SEQ ID NO: 1817 - RNA, 75 nt, synthetic construct
  misc_feature 1..75: note = Description of sequence: tRNA-based effector molecule; TREM No.: 1055
  source 1..75: mol_type = other RNA
gggtccatggagtaatggtaagctctctggcctctaaatccagcgatccgagttcgagtctcggtggaccctcca

SEQ ID NO: 1818 - RNA, 75 nt, synthetic construct
  misc_feature 1..75: note = Description of sequence: tRNA-based effector molecule; TREM No.: 1056
  source 1..75: mol_type = other RNA
ggttccgtggtgtaatggtaagcactcaggcctctaaatcctgcgatccgagttcgagtctcggcggaacctcca

SEQ ID NO: 1819 - RNA, 75 nt, synthetic construct
  misc_feature 1..75: note = Description of sequence: tRNA-based effector molecule; TREM No.: 1057
  source 1..75: mol_type = other RNA
ggttccatggtgtaatggtaagcactccgaactctaaattcggcgatccgagttcgagcctcggtggaacctcca

SEQ ID NO: 1820 - RNA, 75 nt, synthetic construct
  misc_feature 1..75: note = Description of sequence: tRNA-based effector molecule; TREM No.: 1058
  source 1..75: mol_type = other RNA
ggttccatggtgtaaaggtaagcactccggcctctaaatccggcgatccgagttcgagtctcggtggaacctcca

SEQ ID NO: 1821 - RNA, 75 nt, synthetic construct
  misc_feature 1..75: note = Description of sequence: tRNA-based effector molecule; TREM No.: 1059
  source 1..75: mol_type = other RNA
ggttccatggtgtaatggttagcactccgatctctaaaatcggcgatccgagttcaagtctcggtggaacctcca

SEQ ID NO: 1822 - RNA, 75 nt, synthetic construct
  misc_feature 1..75: note = Description of sequence: tRNA-based effector molecule; TREM No.: 1060
  source 1..75: mol_type = other RNA
ggttccatggtataatggtaagtactccgagctctaaactcggcgatccgagttcgagtctcggtggaacctcca

SEQ ID NO: 1823 - RNA, 75 nt, synthetic construct
  misc_feature 1..75: note = Description of sequence: tRNA-based effector molecule; TREM No.: 1061
  source 1..75: mol_type = other RNA
ggttccatggtgtaatggtaagcactctggcctctaaatccagcgataccagttcgagtctggttggaacctcca

SEQ ID NO: 1824 - RNA, 75 nt, synthetic construct
  misc_feature 1..75: note = Description of sequence: tRNA-based effector molecule; TREM No.: 1062
  source 1..75: mol_type = other RNA
ggtaccatggtgtagtggtaagcactccgatctctaaaatcggcgatccgagttcgagtctcggtggtacctcca

SEQ ID NO: 1825 - RNA, 75 nt, synthetic construct
  misc_feature 1..75: note = Description of sequence: tRNA-based effector molecule; TREM No.: 1063
  source 1..75: mol_type = other RNA
ggttccatggtgtaatggtaagcactccgatctctaaaatcggcgatcagagttcgagtctctgtggaaccacca

SEQ ID NO: 1826 - RNA, 75 nt, synthetic construct
  misc_feature 1..75: note = Description of sequence: tRNA-based effector molecule; TREM No.: 1064
  source 1..75: mol_type = other RNA
ggttccatagtgtaatggtaagcactctggcccctaaatccagcgatccgagttcgagtctcggtggaacctcca

SEQ ID NO: 1827 - RNA, 75 nt, synthetic construct
  misc_feature 1..75: note = Description of sequence: tRNA-based effector molecule; TREM No.: 1065
  source 1..75: mol_type = other RNA
ggttccatggtgtaatggtaagcactccgatctctaaaatcggcgatccgtgttcgagtcacggtggaaccccca

SEQ ID NO: 1828 - RNA, 75 nt, synthetic construct
  misc_feature 1..75: note = Description of sequence: tRNA-based effector molecule; TREM No.: 1066
  source 1..75: mol_type = other RNA
ggttgcatggtgtaatggtaagcactgcgatctctaaaatcgccgatccgagttcgagtctcggtgcaacctcca

SEQ ID NO: 1829 - RNA, 75 nt, synthetic construct
  misc_feature 1..75: note = Description of sequence: tRNA-based effector molecule; TREM No.: 1067
  source 1..75: mol_type = other RNA
ggttccatggtgtaatgggaagcactctggcctctaaatccagcgatctgagttcgagtctcagtggaacctcca

SEQ ID NO: 1830 - RNA, 75 nt, synthetic construct
  misc_feature 1..75: note = Description of sequence: tRNA-based effector molecule; TREM No.: 1068
  source 1..75: mol_type = other RNA
gcttccatggtgtaatggtaagcactccgatctctaaaatcggggatccgagttcgagtctcggtggaagctcca

SEQ ID NO: 1831 - RNA, 75 nt, synthetic construct
  misc_feature 1..75: note = Description of sequence: tRNA-based effector molecule; TREM No.: 1069
  source 1..75: mol_type = other RNA
ggttccatggtgtaatggtaagcactccgctctctaaaagcggcgatcggagttcgagtctccgtggaacctcca

SEQ ID NO: 1832 - RNA, 75 nt, synthetic construct
  misc_feature 1..75: note = Description of sequence: tRNA-based effector molecule; TREM No.: 1070
  source 1..75: mol_type = other RNA
ggttccatggtgtaatggtaagcactccgacctctaaagtcggcgatgcgagttcgagtctcgctggaacctcca

SEQ ID NO: 1833 - RNA, 75 nt, synthetic construct
  misc_feature 1..75: note = Description of sequence: tRNA-based effector molecule; TREM No.: 1071
  source 1..75: mol_type = other RNA
ggtaacatggtgtaatggtaagcactccgatctctaaaatcggcgatccgagttcgagtctcggtgttacctcca

SEQ ID NO: 1834 - RNA, 75 nt, synthetic construct
  misc_feature 1..75: note = Description of sequence: tRNA-based effector molecule; TREM No.: 1072
  source 1..75: mol_type = other RNA
ggttccatggtgtaatggtaagcactctggactctaagtccagcgatccgagttcgagtctcggtggaacctcca

SEQ ID NO: 1835 - RNA, 75 nt, synthetic construct
  misc_feature 1..75: note = Description of sequence: tRNA-based effector molecule; TREM No.: 1073
  source 1..75: mol_type = other RNA
ggttccatggtgtaatggtaagcactctggactctaaatccagcgatccgagttcgagtctcggtggaacctcca

SEQ ID NO: 1836 - RNA, 76 nt, synthetic construct; identical to SEQ ID NO: 1415
  misc_feature 1..76: note = Description of sequence: tRNA-based effector molecule; TREM No.: 1074
  source 1..76: mol_type = other RNA

SEQ ID NO: 1837 - RNA, 76 nt, synthetic construct; identical to SEQ ID NO: 1415
  misc_feature 1..76: note = Description of sequence: tRNA-based effector molecule; TREM No.: 1075
  source 1..76: mol_type = other RNA

SEQ ID NO: 1838 - RNA, 76 nt, synthetic construct; identical to SEQ ID NO: 1425
  misc_feature 1..76: note = Description of sequence: tRNA-based effector molecule; TREM No.: 1076
  source 1..76: mol_type = other RNA

SEQ ID NO: 1839 - RNA, 76 nt, synthetic construct; identical to SEQ ID NO: 1377
  misc_feature 1..76: note = Description of sequence: tRNA-based effector molecule; TREM No.: 1077
  source 1..76: mol_type = other RNA

SEQ ID NO: 1840 - RNA, 76 nt, synthetic construct; identical to SEQ ID NO: 1441
  misc_feature 1..76: note = Description of sequence: tRNA-based effector molecule; TREM No.: 1078
  source 1..76: mol_type = other RNA

SEQ ID NO: 1841 - RNA, 76 nt, synthetic construct; identical to SEQ ID NO: 1421
  misc_feature 1..76: note = Description of sequence: tRNA-based effector molecule; TREM No.: 1079
  source 1..76: mol_type = other RNA

SEQ ID NO: 1842 - RNA, 76 nt, synthetic construct; identical to SEQ ID NO: 1385
  misc_feature 1..76: note = Description of sequence: tRNA-based effector molecule; TREM No.: 1080
  source 1..76: mol_type = other RNA

SEQ ID NO: 1843 - RNA, 76 nt, synthetic construct; identical to SEQ ID NO: 1352
  misc_feature 1..76: note = Description of sequence: tRNA-based effector molecule; TREM No.: 1081
  source 1..76: mol_type = other RNA

SEQ ID NO: 1844 - RNA, 76 nt, synthetic construct; identical to SEQ ID NO: 1327
  misc_feature 1..76: note = Description of sequence: tRNA-based effector molecule; TREM No.: 1082
  source 1..76: mol_type = other RNA

SEQ ID NO: 1845 - RNA, 76 nt, synthetic construct; identical to SEQ ID NO: 1422
  misc_feature 1..76: note = Description of sequence: tRNA-based effector molecule; TREM No.: 1083
  source 1..76: mol_type = other RNA

SEQ ID NO: 1846 - RNA, 76 nt, synthetic construct; identical to SEQ ID NO: 1353
  misc_feature 1..76: note = Description of sequence: tRNA-based effector molecule; TREM No.: 1084
  source 1..76: mol_type = other RNA

SEQ ID NO: 1847 - RNA, 76 nt, synthetic construct; identical to SEQ ID NO: 1391
  misc_feature 1..76: note = Description of sequence: tRNA-based effector molecule; TREM No.: 1085
  source 1..76: mol_type = other RNA

SEQ ID NO: 1848 - RNA, 76 nt, synthetic construct; identical to SEQ ID NO: 1423
  misc_feature 1..76: note = Description of sequence: tRNA-based effector molecule; TREM No.: 1086
  source 1..76: mol_type = other RNA

SEQ ID NO: 1849 - RNA, 76 nt, synthetic construct; identical to SEQ ID NO: 1444
  misc_feature 1..76: note = Description of sequence: tRNA-based effector molecule; TREM No.: 1087
  source 1..76: mol_type = other RNA

SEQ ID NO: 1850 - RNA, 76 nt, synthetic construct; identical to SEQ ID NO: 1400
  misc_feature 1..76: note = Description of sequence: tRNA-based effector molecule; TREM No.: 1088
  source 1..76: mol_type = other RNA

SEQ ID NO: 1851 - RNA, 76 nt, synthetic construct; identical to SEQ ID NO: 1362
  misc_feature 1..76: note = Description of sequence: tRNA-based effector molecule; TREM No.: 1089
  source 1..76: mol_type = other RNA

SEQ ID NO: 1852 - RNA, 76 nt, synthetic construct; identical to SEQ ID NO: 1332
  misc_feature 1..76: note = Description of sequence: tRNA-based effector molecule; TREM No.: 1090
  source 1..76: mol_type = other RNA

SEQ ID NO: 1853 - RNA, 76 nt, synthetic construct; identical to SEQ ID NO: 1318
  misc_feature 1..76: note = Description of sequence: tRNA-based effector molecule; TREM No.: 1091
  source 1..76: mol_type = other RNA

SEQ ID NO: 1854 - RNA, 75 nt, synthetic construct; identical to SEQ ID NO: 1326
  misc_feature 1..75: note = Description of sequence: tRNA-based effector molecule; TREM No.: 1092
  source 1..75: mol_type = other RNA

SEQ ID NO: 1855 - RNA, 76 nt, synthetic construct; identical to SEQ ID NO: 1410
  misc_feature 1..76: note = Description of sequence: tRNA-based effector molecule; TREM No.: 1093
  source 1..76: mol_type = other RNA

SEQ ID NO: 1856 - RNA, 76 nt, synthetic construct; identical to SEQ ID NO: 1386
  misc_feature 1..76: note = Description of sequence: tRNA-based effector molecule; TREM No.: 1094
  source 1..76: mol_type = other RNA

SEQ ID NO: 1857 - RNA, 76 nt, synthetic construct; identical to SEQ ID NO: 1380
  misc_feature 1..76: note = Description of sequence: tRNA-based effector molecule; TREM No.: 1095
  source 1..76: mol_type = other RNA

SEQ ID NO: 1858 - RNA, 76 nt, synthetic construct; identical to SEQ ID NO: 1405
  misc_feature 1..76: note = Description of sequence: tRNA-based effector molecule; TREM No.: 1096
  source 1..76: mol_type = other RNA

SEQ ID NO: 1859 - RNA, 76 nt, synthetic construct; identical to SEQ ID NO: 1338
  misc_feature 1..76: note = Description of sequence: tRNA-based effector molecule; TREM No.: 1097
  source 1..76: mol_type = other RNA

SEQ ID NO: 1860 - RNA, 76 nt, synthetic construct; identical to SEQ ID NO: 1375
  misc_feature 1..76: note = Description of sequence: tRNA-based effector molecule; TREM No.: 1098
  source 1..76: mol_type = other RNA

SEQ ID NO: 1861 - RNA, 76 nt, synthetic construct; identical to SEQ ID NO: 1344
  misc_feature 1..76: note = Description of sequence: tRNA-based effector molecule; TREM No.: 1099
  source 1..76: mol_type = other RNA

SEQ ID NO: 1862 - RNA, 76 nt, synthetic construct; identical to SEQ ID NO: 1451
  misc_feature 1..76: note = Description of sequence: tRNA-based effector molecule; TREM No.: 1100
  source 1..76: mol_type = other RNA

SEQ ID NO: 1863 - RNA, 76 nt, synthetic construct; identical to SEQ ID NO: 1387
  misc_feature 1..76: note = Description of sequence: tRNA-based effector molecule; TREM No.: 1101
  source 1..76: mol_type = other RNA

SEQ ID NO: 1864 - RNA, 76 nt, synthetic construct; identical to SEQ ID NO: 1309
  misc_feature 1..76: note = Description of sequence: tRNA-based effector molecule; TREM No.: 1102
  source 1..76: mol_type = other RNA

SEQ ID NO: 1865 - RNA, 76 nt, synthetic construct; identical to SEQ ID NO: 1372
  misc_feature 1..76: note = Description of sequence: tRNA-based effector molecule; TREM No.: 1103
  source 1..76: mol_type = other RNA

SEQ ID NO: 1866 - RNA, 76 nt, synthetic construct; identical to SEQ ID NO: 1392
  misc_feature 1..76: note = Description of sequence: tRNA-based effector molecule; TREM No.: 1104
  source 1..76: mol_type = other RNA

SEQ ID NO: 1867 - RNA, 76 nt, synthetic construct; identical to SEQ ID NO: 1376
  misc_feature 1..76: note = Description of sequence: tRNA-based effector molecule; TREM No.: 1105
  source 1..76: mol_type = other RNA

SEQ ID NO: 1868 - RNA, 76 nt, synthetic construct; identical to SEQ ID NO: 1439
  misc_feature 1..76: note = Description of sequence: tRNA-based effector molecule; TREM No.: 1106
  source 1..76: mol_type = other RNA

SEQ ID NO: 1869 - RNA, 76 nt, synthetic construct; identical to SEQ ID NO: 1339
  misc_feature 1..76: note = Description of sequence: tRNA-based effector molecule; TREM No.: 1107
  source 1..76: mol_type = other RNA

SEQ ID NO: 1870 - RNA, 76 nt, synthetic construct; identical to SEQ ID NO: 1409
  misc_feature 1..76: note = Description of sequence: tRNA-based effector molecule; TREM No.: 1108
  source 1..76: mol_type = other RNA

SEQ ID NO: 1871 - RNA, 76 nt, synthetic construct; identical to SEQ ID NO: 1396
  misc_feature 1..76: note = Description of sequence: tRNA-based effector molecule; TREM No.: 1109
  source 1..76: mol_type = other RNA

SEQ ID NO: 1872 - RNA, 76 nt, synthetic construct; identical to SEQ ID NO: 1448
  misc_feature 1..76: note = Description of sequence: tRNA-based effector molecule; TREM No.: 1110
  source 1..76: mol_type = other RNA

SEQ ID NO: 1873 - RNA, 76 nt, synthetic construct; identical to SEQ ID NO: 1290
  misc_feature 1..76: note = Description of sequence: tRNA-based effector molecule; TREM No.: 1111
  source 1..76: mol_type = other RNA

SEQ ID NO: 1874 - RNA, 76 nt, synthetic construct; identical to SEQ ID NO: 1440
  misc_feature 1..76: note = Description of sequence: tRNA-based effector molecule; TREM No.: 1112
  source 1..76: mol_type = other RNA

SEQ ID NO: 1875 - RNA, 76 nt, synthetic construct; identical to SEQ ID NO: 1426
  misc_feature 1..76: note = Description of sequence: tRNA-based effector molecule; TREM No.: 1113
  source 1..76: mol_type = other RNA

SEQ ID NO: 1876 - RNA, 76 nt, synthetic construct; identical to SEQ ID NO: 1295
  misc_feature 1..76: note = Description of sequence: tRNA-based effector molecule; TREM No.: 1114
  source 1..76: mol_type = other RNA

SEQ ID NO: 1877 - RNA, 76 nt, synthetic construct; identical to SEQ ID NO: 1416
  misc_feature 1..76: note = Description of sequence: tRNA-based effector molecule; TREM No.: 1115
  source 1..76: mol_type = other RNA

SEQ ID NO: 1878 - RNA, 76 nt, synthetic construct; identical to SEQ ID NO: 1388
  misc_feature 1..76: note = Description of sequence: tRNA-based effector molecule; TREM No.: 1116
  source 1..76: mol_type = other RNA

SEQ ID NO: 1879 - RNA, 76 nt, synthetic construct; identical to SEQ ID NO: 1412
  misc_feature 1..76: note = Description of sequence: tRNA-based effector molecule; TREM No.: 1117
  source 1..76: mol_type = other RNA

SEQ ID NO: 1880 - RNA, 76 nt, synthetic construct; identical to SEQ ID NO: 1348
  misc_feature 1..76: note = Description of sequence: tRNA-based effector molecule; TREM No.: 1118
  source 1..76: mol_type = other RNA

SEQ ID NO: 1881 - RNA, 76 nt, synthetic construct; identical to SEQ ID NO: 1383
  misc_feature 1..76: note = Description of sequence: tRNA-based effector molecule; TREM No.: 1119
  source 1..76: mol_type = other RNA

SEQ ID NO: 1882 - RNA, 76 nt, synthetic construct; identical to SEQ ID NO: 1418
  misc_feature 1..76: note = Description of sequence: tRNA-based effector molecule; TREM No.: 1120
  source 1..76: mol_type = other RNA

SEQ ID NO: 1883 - RNA, 76 nt, synthetic construct; identical to SEQ ID NO: 1308
  misc_feature 1..76: note = Description of sequence: tRNA-based effector molecule; TREM No.: 1121
  source 1..76: mol_type = other RNA

SEQ ID NO: 1884 - RNA, 76 nt, synthetic construct; identical to SEQ ID NO: 1308
  misc_feature 1..76: note = Description of sequence: tRNA-based effector molecule; TREM No.: 1122
  source 1..76: mol_type = other RNA

SEQ ID NO: 1885 - RNA, 76 nt, synthetic construct; identical to SEQ ID NO: 1319
  misc_feature 1..76: note = Description of sequence: tRNA-based effector molecule; TREM No.: 1123
  source 1..76: mol_type = other RNA

SEQ ID NO: 1886 - RNA, 76 nt, synthetic construct; identical to SEQ ID NO: 1381
  misc_feature 1..76: note = Description of sequence: tRNA-based effector molecule; TREM No.: 1124
  source 1..76: mol_type = other RNA

SEQ ID NO: 1887 - RNA, 76 nt, synthetic construct; identical to SEQ ID NO: 1450
  misc_feature 1..76: note = Description of sequence: tRNA-based effector molecule; TREM No.: 1125
  source 1..76: mol_type = other RNA

SEQ ID NO: 1888 - RNA, 76 nt, synthetic construct; identical to SEQ ID NO: 1346
  misc_feature 1..76: note = Description of sequence: tRNA-based effector molecule; TREM No.: 1126
  source 1..76: mol_type = other RNA

SEQ ID NO: 1889 - RNA, 76 nt, synthetic construct; identical to SEQ ID NO: 1349
  misc_feature 1..76: note = Description of sequence: tRNA-based effector molecule; TREM No.: 1127
  source 1..76: mol_type = other RNA

SEQ ID NO: 1890 - RNA, 76 nt, synthetic construct; identical to SEQ ID NO: 1417
  misc_feature 1..76: note = Description of sequence: tRNA-based effector molecule; TREM No.: 1128
  source 1..76: mol_type = other RNA

SEQ ID NO: 1891 - RNA, 76 nt, synthetic construct; identical to SEQ ID NO: 1411
  misc_feature 1..76: note = Description of sequence: tRNA-based effector molecule; TREM No.: 1129
  source 1..76: mol_type = other RNA

SEQ ID NO: 1892 - RNA, 76 nt, synthetic construct; identical to SEQ ID NO: 1291
  misc_feature 1..76: note = Description of sequence: tRNA-based effector molecule; TREM No.: 1130
  source 1..76: mol_type = other RNA

SEQ ID NO: 1893 - RNA, 76 nt, synthetic construct; identical to SEQ ID NO: 1307
  misc_feature 1..76: note = Description of sequence: tRNA-based effector molecule; TREM No.: 1131
  source 1..76: mol_type = other RNA

SEQ ID NO: 1894 - RNA, 76 nt, synthetic construct; identical to SEQ ID NO: 1297
  misc_feature 1..76: note = Description of sequence: tRNA-based effector molecule; TREM No.: 1132
  source 1..76: mol_type = other RNA

SEQ ID NO: 1895 - RNA, 76 nt, synthetic construct; identical to SEQ ID NO: 1361
  misc_feature 1..76: note = Description of sequence: tRNA-based effector molecule; TREM No.: 1133
  source 1..76: mol_type = other RNA

SEQ ID NO: 1896 - RNA, 76 nt, synthetic construct; identical to SEQ ID NO: 1365
  misc_feature 1..76: note = Description of sequence: tRNA-based effector molecule; TREM No.: 1134
  source 1..76: mol_type = other RNA

SEQ ID NO: 1897 - RNA, 76 nt, synthetic construct; identical to SEQ ID NO: 1389
  misc_feature 1..76: note = Description of sequence: tRNA-based effector molecule; TREM No.: 1135
  source 1..76: mol_type = other RNA

SEQ ID NO: 1898 - RNA, 76 nt, synthetic construct; identical to SEQ ID NO: 1340
  misc_feature 1..76: note = Description of sequence: tRNA-based effector molecule; TREM No.: 1136
  source 1..76: mol_type = other RNA

SEQ ID NO: 1899 - RNA, 76 nt, synthetic construct; identical to SEQ ID NO: 1340
  misc_feature 1..76: note = Description of sequence: tRNA-based effector molecule; TREM No.: 1137
  source 1..76: mol_type = other RNA

SEQ ID NO: 1900 - RNA, 76 nt, synthetic construct; identical to SEQ ID NO: 1315
  misc_feature 1..76: note = Description of sequence: tRNA-based effector molecule; TREM No.: 1138
  source 1..76: mol_type = other RNA

SEQ ID NO: 1901 - RNA, 76 nt, synthetic construct; identical to SEQ ID NO: 1382
  misc_feature 1..76: note = Description of sequence: tRNA-based effector molecule; TREM No.: 1139
  source 1..76: mol_type = other RNA

SEQ ID NO: 1902 - RNA, 76 nt, synthetic construct; identical to SEQ ID NO: 1351
  misc_feature 1..76: note = Description of sequence: tRNA-based effector molecule; TREM No.: 1140
  source 1..76: mol_type = other RNA

SEQ ID NO: 1903 - RNA, 76 nt, synthetic construct; identical to SEQ ID NO: 1368
  misc_feature 1..76: note = Description of sequence: tRNA-based effector molecule; TREM No.: 1141
  source 1..76: mol_type = other RNA

SEQ ID NO: 1904 - RNA, 76 nt, synthetic construct; identical to SEQ ID NO: 1447
  misc_feature 1..76: note = Description of sequence: tRNA-based effector molecule; TREM No.: 1142
  source 1..76: mol_type = other RNA

SEQ ID NO: 1905 - RNA, 76 nt, synthetic construct; identical to SEQ ID NO: 1394
  misc_feature 1..76: note = Description of sequence: tRNA-based effector molecule; TREM No.: 1143
  source 1..76: mol_type = other RNA

SEQ ID NO: 1906 - RNA, 76 nt, synthetic construct; identical to SEQ ID NO: 1390
  misc_feature 1..76: note = Description of sequence: tRNA-based effector molecule; TREM No.: 1144
  source 1..76: mol_type = other RNA

SEQ ID NO: 1907 - RNA, 76 nt, synthetic construct; identical to SEQ ID NO: 1310
  misc_feature 1..76: note = Description of sequence: tRNA-based effector molecule; TREM No.: 1145
  source 1..76: mol_type = other RNA

SEQ ID NO: 1908 - RNA, 76 nt, synthetic construct; identical to SEQ ID NO: 1414
  misc_feature 1..76: note = Description of sequence: tRNA-based effector molecule; TREM No.: 1146
  source 1..76: mol_type = other RNA

SEQ ID NO: 1909 - RNA, 75 nt, synthetic construct; identical to SEQ ID NO: 1300
  misc_feature 1..75: note = Description of sequence: tRNA-based effector molecule; TREM No.: 1147
  source 1..75: mol_type = other RNA

SEQ ID NO: 1910 - RNA, 76 nt, synthetic construct; identical to SEQ ID NO: 1331
  misc_feature 1..76: note = Description of sequence: tRNA-based effector molecule; TREM No.: 1148
  source 1..76: mol_type = other RNA

SEQ ID NO: 1911 - RNA, 76 nt, synthetic construct; identical to SEQ ID NO: 1325
  misc_feature 1..76: note = Description of sequence: tRNA-based effector molecule; TREM No.: 1149
  source 1..76: mol_type = other RNA

SEQ ID NO: 1912 - RNA, 76 nt, synthetic construct; identical to SEQ ID NO: 1317
  misc_feature 1..76: note = Description of sequence: tRNA-based effector molecule; TREM No.: 1150
  source 1..76: mol_type = other RNA

SEQ ID NO: 1913 - RNA, 76 nt, synthetic construct; identical to SEQ ID NO: 1420
  misc_feature 1..76: note = Description of sequence: tRNA-based effector molecule; TREM No.: 1151
  source 1..76: mol_type = other RNA

SEQ ID NO: 1914 - RNA, 76 nt, synthetic construct; identical to SEQ ID NO: 1398
  misc_feature 1..76: note = Description of sequence: tRNA-based effector molecule; TREM No.: 1152
  source 1..76: mol_type = other RNA

SEQ ID NO: 1915 - RNA, 76 nt, synthetic construct; identical to SEQ ID NO: 1342
  misc_feature 1..76: note = Description of sequence: tRNA-based effector molecule; TREM No.: 1153
  source 1..76: mol_type = other RNA

SEQ ID NO: 1916 - RNA, 76 nt, synthetic construct; identical to SEQ ID NO: 1335
  misc_feature 1..76: note = Description of sequence: tRNA-based effector molecule; TREM No.: 1154
  source 1..76: mol_type = other RNA

SEQ ID NO: 1917 - RNA, 76 nt, synthetic construct; identical to SEQ ID NO: 1294
  misc_feature 1..76: note = Description of sequence: tRNA-based effector molecule; TREM No.: 1155
  source 1..76: mol_type = other RNA

SEQ ID NO: 1918 - RNA, 76 nt, synthetic construct; identical to SEQ ID NO: 1449
  misc_feature 1..76: note = Description of sequence: tRNA-based effector molecule; TREM No.: 1156
  source 1..76: mol_type = other RNA

SEQ ID NO: 1919 - RNA, 76 nt, synthetic construct; identical to SEQ ID NO: 1336
  misc_feature 1..76: note = Description of sequence: tRNA-based effector molecule; TREM No.: 1157
  source 1..76: mol_type = other RNA

SEQ ID NO: 1920 - RNA, 76 nt, synthetic construct; identical to SEQ ID NO: 1434
  misc_feature 1..76: note = Description of sequence: tRNA-based effector molecule; TREM No.: 1158
  source 1..76: mol_type = other RNA

SEQ ID NO: 1921 - RNA, 76 nt, synthetic construct; identical to SEQ ID NO: 1333
  misc_feature 1..76: note = Description of sequence: tRNA-based effector molecule; TREM No.: 1159
  source 1..76: mol_type = other RNA

SEQ ID NO: 1922 - RNA, 76 nt, synthetic construct; identical to SEQ ID NO: 1428
  misc_feature 1..76: note = Description of sequence: tRNA-based effector molecule; TREM No.: 1160
  source 1..76: mol_type = other RNA

SEQ ID NO: 1923 - RNA, 75 nt, synthetic construct; identical to SEQ ID NO: 1360
  misc_feature 1..75: note = Description of sequence: tRNA-based effector molecule; TREM No.: 1161
  source 1..75: mol_type = other RNA

SEQ ID NO: 1924 - RNA, 76 nt, synthetic construct; identical to SEQ ID NO: 1357
  misc_feature 1..76: note = Description of sequence: tRNA-based effector molecule; TREM No.: 1162
  source 1..76: mol_type = other RNA

SEQ ID NO: 1925 - RNA, 76 nt, synthetic construct; identical to SEQ ID NO: 1356
  misc_feature 1..76: note = Description of sequence: tRNA-based effector molecule; TREM No.: 1163
  source 1..76: mol_type = other RNA

SEQ ID NO: 1926 - RNA, 76 nt, synthetic construct; identical to SEQ ID NO: 1429
  misc_feature 1..76: note = Description of sequence: tRNA-based effector molecule; TREM No.: 1164
  source 1..76: mol_type = other RNA

SEQ ID NO: 1927 - RNA, 76 nt, synthetic construct; identical to SEQ ID NO: 1402
  misc_feature 1..76: note = Description of sequence: tRNA-based effector molecule; TREM No.: 1165
  source 1..76: mol_type = other RNA

SEQ ID NO: 1928 - RNA, 76 nt, synthetic construct; identical to SEQ ID NO: 1299
  misc_feature 1..76: note = Description of sequence: tRNA-based effector molecule; TREM No.: 1166
  source 1..76: mol_type = other RNA

SEQ ID NO: 1929 - RNA, 75 nt, synthetic construct; identical to SEQ ID NO: 1378
  misc_feature 1..75: note = Description of sequence: tRNA-based effector molecule; TREM No.: 1167
  source 1..75: mol_type = other RNA

SEQ ID NO: 1930 - RNA, 76 nt, synthetic construct; identical to SEQ ID NO: 1364
  misc_feature 1..76: note = Description of sequence: tRNA-based effector molecule; TREM No.: 1168
  source 1..76: mol_type = other RNA

SEQ ID NO: 1931 - RNA, 76 nt, synthetic construct; identical to SEQ ID NO: 1324
  misc_feature 1..76: note = Description of sequence: tRNA-based effector molecule; TREM No.: 1169
  source 1..76: mol_type = other RNA

SEQ ID NO: 1932 - RNA, 76 nt, synthetic construct; identical to SEQ ID NO: 1324
  misc_feature 1..76: note = Description of sequence: tRNA-based effector molecule; TREM No.: 1170
  source 1..76: mol_type = other RNA

SEQ ID NO: 1933 - RNA, 75 nt, synthetic construct; identical to SEQ ID NO: 1373
  misc_feature 1..75: note = Description of sequence: tRNA-based effector molecule; TREM No.: 1171
  source 1..75: mol_type = other RNA

SEQ ID NO: 1934 - RNA, 76 nt, synthetic construct; identical to SEQ ID NO: 1306
  misc_feature 1..76: note = Description of sequence: tRNA-based effector molecule; TREM No.: 1172
  source 1..76: mol_type = other RNA

SEQ ID NO: 1935 - RNA, 76 nt, synthetic construct; identical to SEQ ID NO: 1305
  misc_feature 1..76: note = Description of sequence: tRNA-based effector molecule; TREM No.: 1173
  source 1..76: mol_type = other RNA

SEQ ID NO: 1936 - RNA, 76 nt, synthetic construct; identical to SEQ ID NO: 1304
  misc_feature 1..76: note = Description of sequence: tRNA-based effector molecule; TREM No.: 1174
  source 1..76: mol_type = other RNA

SEQ ID NO: 1937 - RNA, 76 nt, synthetic construct; identical to SEQ ID NO: 1432
  misc_feature 1..76: note = Description of sequence: tRNA-based effector molecule; TREM No.: 1175
  source 1..76: mol_type = other RNA

SEQ ID NO: 1938 - RNA, 76 nt, synthetic construct; identical to SEQ ID NO: 1358
  misc_feature 1..76: note = Description of sequence: tRNA-based effector molecule; TREM No.: 1176
  source 1..76: mol_type = other RNA

SEQ ID NO: 1939 - RNA, 76 nt, synthetic construct; identical to SEQ ID NO: 1436
  misc_feature 1..76: note = Description of sequence: tRNA-based effector molecule; TREM No.: 1177
  source 1..76: mol_type = other RNA

SEQ ID NO: 1940 - RNA, 76 nt, synthetic construct; identical to SEQ ID NO: 1323
  misc_feature 1..76: note = Description of sequence: tRNA-based effector molecule; TREM No.: 1178
  source 1..76: mol_type = other RNA

SEQ ID NO: 1941 - RNA, 76 nt, synthetic construct; identical to SEQ ID NO: 1413
  misc_feature 1..76: note = Description of sequence: tRNA-based effector molecule; TREM No.: 1179
  source 1..76: mol_type = other RNA

SEQ ID NO: 1942 - RNA, 76 nt, synthetic construct; identical to SEQ ID NO: 1452
  misc_feature 1..76: note = Description of sequence: tRNA-based effector molecule; TREM No.: 1180
  source 1..76: mol_type = other RNA

SEQ ID NO: 1943 - RNA, 76 nt, synthetic construct; identical to SEQ ID NO: 1316
  misc_feature 1..76: note = Description of sequence: tRNA-based effector molecule; TREM No.: 1181
  source 1..76: mol_type = other RNA

SEQ ID NO: 1944 - RNA, 76 nt, synthetic construct; identical to SEQ ID NO: 1303
  misc_feature 1..76: note = Description of sequence: tRNA-based effector molecule; TREM No.: 1182
  source 1..76: mol_type = other RNA

SEQ ID NO: 1945 - RNA, 76 nt, synthetic construct; identical to SEQ ID NO: 1347
  misc_feature 1..76: note = Description of sequence: tRNA-based effector molecule; TREM No.: 1183
  source 1..76: mol_type = other RNA

SEQ ID NO: 1946 - RNA, 76 nt, synthetic construct; identical to SEQ ID NO: 1347
  misc_feature 1..76: note = Description of sequence: tRNA-based effector molecule; TREM No.: 1184
  source 1..76: mol_type = other RNA

SEQ ID NO: 1947 - RNA, 76 nt, synthetic construct; identical to SEQ ID NO: 1430
  misc_feature 1..76: note = Description of sequence: tRNA-based effector molecule; TREM No.: 1185
  source 1..76: mol_type = other RNA

SEQ ID NO: 1948 - RNA, 76 nt, synthetic construct; identical to SEQ ID NO: 1404
  misc_feature 1..76: note = Description of sequence: tRNA-based effector molecule; TREM No.: 1186
  source 1..76: mol_type = other RNA

SEQ ID NO: 1949 - RNA, 76 nt, synthetic construct; identical to SEQ ID NO: 1424
  misc_feature 1..76: note = Description of sequence: tRNA-based effector molecule; TREM No.: 1187
  source 1..76: mol_type = other RNA

SEQ ID NO: 1950 - RNA, 76 nt, synthetic construct; identical to SEQ ID NO: 1384
  misc_feature 1..76: note = Description of sequence: tRNA-based effector molecule; TREM No.: 1188
  source 1..76: mol_type = other RNA

SEQ ID NO: 1951 - RNA, 76 nt, synthetic construct; identical to SEQ ID NO: 1393
  misc_feature 1..76: note = Description of sequence: tRNA-based effector molecule; TREM No.: 1189
  source 1..76: mol_type = other RNA

SEQ ID NO: 1952 - RNA, 76 nt, synthetic construct; identical to SEQ ID NO: 1369
  misc_feature 1..76: note = Description of sequence: tRNA-based effector molecule; TREM No.: 1190
  source 1..76: mol_type = other RNA

SEQ ID NO: 1953 - RNA, 76 nt, synthetic construct; identical to SEQ ID NO: 1406
  misc_feature 1..76: note = Description of sequence: tRNA-based effector molecule; TREM No.: 1191
  source 1..76: mol_type = other RNA

SEQ ID NO: 1954 - RNA, 76 nt, synthetic construct; identical to SEQ ID NO: 1419
  misc_feature 1..76: note = Description of sequence: tRNA-based effector molecule; TREM No.: 1192
  source 1..76: mol_type = other RNA

SEQ ID NO: 1955 - RNA, 76 nt, synthetic construct; identical to SEQ ID NO: 1397
  misc_feature 1..76: note = Description of sequence: tRNA-based effector molecule; TREM No.: 1193
  source 1..76: mol_type = other RNA

SEQ ID NO: 1956 - RNA, 76 nt, synthetic construct; identical to SEQ ID NO: 1329
  misc_feature 1..76: note = Description of sequence: tRNA-based effector molecule; TREM No.: 1194
  source 1..76: mol_type = other RNA

SEQ ID NO: 1957 - RNA, 76 nt, synthetic construct; identical to SEQ ID NO: 1401
  misc_feature 1..76: note = Description of sequence: tRNA-based effector molecule; TREM No.: 1195
  source 1..76: mol_type = other RNA

SEQ ID NO: 1958 - RNA, 76 nt, synthetic construct; identical to SEQ ID NO: 1345
  misc_feature 1..76: note = Description of sequence: tRNA-based effector molecule; TREM No.: 1196
  source 1..76: mol_type = other RNA

SEQ ID NO: 1959 - RNA, 76 nt, synthetic construct; identical to SEQ ID NO: 1403
  misc_feature 1..76: note = Description of sequence: tRNA-based effector molecule; TREM No.: 1197
  source 1..76: mol_type = other RNA

SEQ ID NO: 1960 - RNA, 76 nt, synthetic construct; identical to SEQ ID NO: 1341
  misc_feature 1..76: note = Description of sequence: tRNA-based effector molecule; TREM No.: 1198
  source 1..76: mol_type = other RNA

SEQ ID NO: 1961 - RNA, 76 nt, synthetic construct; identical to SEQ ID NO: 1438
  misc_feature 1..76: note = Description of sequence: tRNA-based effector molecule; TREM No.: 1199
  source 1..76: mol_type = other RNA

SEQ ID NO: 1962 - RNA, 76 nt, synthetic construct; identical to SEQ ID NO: 1427
  misc_feature 1..76: note = Description of sequence: tRNA-based effector molecule; TREM No.: 1200
  source 1..76: mol_type = other RNA

SEQ ID NO: 1963 - RNA, 76 nt, synthetic construct; identical to SEQ ID NO: 1314
  misc_feature 1..76: note = Description of sequence: tRNA-based effector molecule; TREM No.: 1201
  source 1..76: mol_type = other RNA

SEQ ID NO: 1964 - RNA, 76 nt, synthetic construct; identical to SEQ ID NO: 1363
  misc_feature 1..76: note = Description of sequence: tRNA-based effector molecule; TREM No.: 1202
  source 1..76: mol_type = other RNA

SEQ ID NO: 1965 - RNA, 76 nt, synthetic construct; identical to SEQ ID NO: 1355
  misc_feature 1..76: note = Description of sequence: tRNA-based effector molecule; TREM No.: 1203
  source 1..76: mol_type = other RNA

SEQ ID NO: 1966 - RNA, 76 nt, synthetic construct; identical to SEQ ID NO: 1354
  misc_feature 1..76: note = Description of sequence: tRNA-based effector molecule; TREM No.: 1204
  source 1..76: mol_type = other RNA

SEQ ID NO: 1967 - RNA, 76 nt, synthetic construct; identical to SEQ ID NO: 1301
  misc_feature 1..76: note = Description of sequence: tRNA-based effector molecule; TREM No.: 1205
  source 1..76: mol_type = other RNA

SEQ ID NO: 1968 - RNA, 76 nt, synthetic construct; identical to SEQ ID NO: 1337
  misc_feature 1..76: note = Description of sequence: tRNA-based effector molecule; TREM No.: 1206
  source 1..76: mol_type = other RNA

SEQ ID NO: 1969 - RNA, 76 nt, synthetic construct; identical to SEQ ID NO: 1328
  misc_feature 1..76: note = Description of sequence: tRNA-based effector molecule; TREM No.: 1207
  source 1..76: mol_type = other RNA

SEQ ID NO: 1970 - RNA, 76 nt, synthetic construct; identical to SEQ ID NO: 1296
  misc_feature 1..76: note = Description of sequence: tRNA-based effector molecule; TREM No.: 1208
  source 1..76: mol_type = other RNA

SEQ ID NO: 1971 - RNA, 76 nt, synthetic construct; identical to SEQ ID NO: 1407
  misc_feature 1..76: note = Description of sequence: tRNA-based effector molecule; TREM No.: 1209
  source 1..76: mol_type = other RNA

SEQ ID NO: 1972 - RNA, 76 nt, synthetic construct; identical to SEQ ID NO: 1445
  misc_feature 1..76: note = Description of sequence: tRNA-based effector molecule; TREM No.: 1210
  source 1..76: mol_type = other RNA

SEQ ID NO: 1973 - RNA, 76 nt, synthetic construct; identical to SEQ ID NO: 1312
  misc_feature 1..76: note = Description of sequence: tRNA-based effector molecule; TREM No.: 1211
  source 1..76: mol_type = other RNA

SEQ ID NO: 1974 - RNA, 76 nt, synthetic construct; identical to SEQ ID NO: 1408
  misc_feature 1..76: note = Description of sequence: tRNA-based effector molecule; TREM No.: 1212
  source 1..76: mol_type = other RNA

SEQ ID NO: 1975 - RNA, 76 nt, synthetic construct; identical to SEQ ID NO: 1433
  misc_feature 1..76: note = Description of sequence: tRNA-based effector molecule; TREM No.: 1213
  source 1..76: mol_type = other RNA

SEQ ID NO: 1976 - RNA, 76 nt, synthetic construct; identical to SEQ ID NO: 1395
  misc_feature 1..76: note = Description of sequence: tRNA-based effector molecule; TREM No.: 1214
  source 1..76: mol_type = other RNA

SEQ ID NO: 1977 - RNA, 76 nt, synthetic construct; identical to SEQ ID NO: 1374
  misc_feature 1..76: note = Description of sequence: tRNA-based effector molecule; TREM No.: 1215
  source 1..76: mol_type = other RNA

SEQ ID NO: 1978 - RNA, 76 nt, synthetic construct; identical to SEQ ID NO: 1311
  misc_feature 1..76: note = Description of sequence: tRNA-based effector molecule; TREM No.: 1216
  source 1..76: mol_type = other RNA

SEQ ID NO: 1979 - RNA, 76 nt, synthetic construct; identical to SEQ ID NO: 1431
  misc_feature 1..76: note = Description of sequence: tRNA-based effector molecule; TREM No.: 1217
  source 1..76: mol_type = other RNA

SEQ ID NO: 1980 - RNA, 76 nt, synthetic construct; identical to SEQ ID NO: 1371
  misc_feature 1..76: note = Description of sequence: tRNA-based effector molecule; TREM No.: 1218
  source 1..76: mol_type = other RNA

SEQ ID NO: 1981 - RNA, 76 nt, synthetic construct; identical to SEQ ID NO: 1320
  misc_feature 1..76: note = Description of sequence: tRNA-based effector molecule; TREM No.: 1219
  source 1..76: mol_type = other RNA

SEQ ID NO: 1982 - RNA, 76 nt, synthetic construct; identical to SEQ ID NO: 1313
  misc_feature 1..76: note = Description of sequence: tRNA-based effector molecule; TREM No.: 1220
  source 1..76: mol_type = other RNA

SEQ ID NO: 1983 - RNA, 76 nt, synthetic construct; identical to SEQ ID NO: 1437
  misc_feature 1..76: note = Description of sequence: tRNA-based effector molecule; TREM No.: 1221
  source 1..76: mol_type = other RNA

SEQ ID NO: 1984 - RNA, 76 nt, synthetic construct; identical to SEQ ID NO: 1350
  misc_feature 1..76: note = Description of sequence: tRNA-based effector molecule; TREM No.: 1222
  source 1..76: mol_type = other RNA

SEQ ID NO: 1985 - RNA, 76 nt, synthetic construct; identical to SEQ ID NO: 1399
  misc_feature 1..76: note = Description of sequence: tRNA-based effector molecule; TREM No.: 1223
  source 1..76: mol_type = other RNA

SEQ ID NO: 1986 - RNA, 76 nt, synthetic construct; identical to SEQ ID NO: 1454
  misc_feature 1..76: note = Description of sequence: tRNA-based effector molecule; TREM No.: 1224
  source 1..76: mol_type = other RNA

SEQ ID NO: 1987 - RNA, 76 nt, synthetic construct; identical to SEQ ID NO: 1343
  misc_feature 1..76: note = Description of sequence: tRNA-based effector molecule; TREM No.: 1225
  source 1..76: mol_type = other RNA

SEQ ID NO: 1988 - RNA, 76 nt, synthetic construct; identical to SEQ ID NO: 1298
  misc_feature 1..76: note = Description of sequence: tRNA-based effector molecule; TREM No.: 1226
  source 1..76: mol_type = other RNA

SEQ ID NO: 1989 - RNA, 76 nt, synthetic construct; identical to SEQ ID NO: 1330
  misc_feature 1..76: note = Description of sequence: tRNA-based effector molecule; TREM No.: 1227
  source 1..76: mol_type = other RNA

SEQ ID NO: 1990 - RNA, 76 nt, synthetic construct; identical to SEQ ID NO: 1293
  misc_feature 1..76: note = Description of sequence: tRNA-based effector molecule; TREM No.: 1228
  source 1..76: mol_type = other RNA

SEQ ID NO: 1991 - RNA, 76 nt, synthetic construct; identical to SEQ ID NO: 1366
  misc_feature 1..76: note = Description of sequence: tRNA-based effector molecule; TREM No.: 1229
  source 1..76: mol_type = other RNA

SEQ ID NO: 1992 - RNA, 76 nt, synthetic construct; identical to SEQ ID NO: 1435
  misc_feature 1..76: note = Description of sequence: tRNA-based effector molecule; TREM No.: 1230
  source 1..76: mol_type = other RNA

SEQ ID NO: 1993 - RNA, 76 nt, synthetic construct; identical to SEQ ID NO: 1359
  misc_feature 1..76: note = Description of sequence: tRNA-based effector molecule; TREM No.: 1231
  source 1..76: mol_type = other RNA

SEQ ID NO: 1994 - RNA, 76 nt, synthetic construct; identical to SEQ ID NO: 1322
  misc_feature 1..76: note = Description of sequence: tRNA-based effector molecule; TREM No.: 1232
  source 1..76: mol_type = other RNA

SEQ ID NO: 1995 - RNA, 76 nt, synthetic construct; identical to SEQ ID NO: 1322
  misc_feature 1..76: note = Description of sequence: tRNA-based effector molecule; TREM No.: 1233
  source 1..76: mol_type = other RNA

SEQ ID NO: 1996 - RNA, 76 nt, synthetic construct; identical to SEQ ID NO: 1302
  misc_feature 1..76: note = Description of sequence: tRNA-based effector molecule; TREM No.: 1234
  source 1..76: mol_type = other RNA

SEQ ID NO: 1997 - RNA, 76 nt, synthetic construct; identical to SEQ ID NO: 1292
  misc_feature 1..76: note = Description of sequence: tRNA-based effector molecule; TREM No.: 1235
  source 1..76: mol_type = other RNA

SEQ ID NO: 1998 - RNA, 76 nt, synthetic construct; identical to SEQ ID NO: 1453
  misc_feature 1..76: note = Description of sequence: tRNA-based effector molecule; TREM No.: 1236
  source 1..76: mol_type = other RNA

SEQ ID NO: 1999 - RNA, 76 nt, synthetic construct; identical to SEQ ID NO: 1321
  misc_feature 1..76: note = Description of sequence: tRNA-based effector molecule; TREM No.: 1237
  source 1..76: mol_type = other RNA

SEQ ID NO: 2000 - RNA, 76 nt, synthetic construct; identical to SEQ ID NO: 1456
  misc_feature 1..76: note = Description of sequence: tRNA-based effector molecule; TREM No.: 1238
  source 1..76: mol_type = other RNA

SEQ ID NO: 2001 - RNA, 75 nt, synthetic construct
  misc_feature 1..75: note = Description of sequence: tRNA-based effector molecule; TREM No.: 1239
  source 1..75: mol_type = other RNA
tcccacatggtctagcggttaggattcctggttctaacccaggcggcccgggttcgactcccggtgtgggaacca

SEQ ID NO: 2002 - RNA, 75 nt, synthetic construct
  misc_feature 1..75: note = Description of sequence: tRNA-based effector molecule; TREM No.: 1240
  source 1..75: mol_type = other RNA
ggttccctggtgtaatggttagcactcctgcctctaaatcaggcgatccgagttcgagtctcgggggaacctcca

SEQ ID NO: 2003 - RNA, 75 nt, synthetic construct
  misc_feature 1..75: note = Description of sequence: tRNA-based effector molecule; TREM No.: 1241
  source 1..75: mol_type = other RNA
ggttccatggtgtaatggtaatcacttgtaactctaaactacaagatccgagttcgagtctcggtggaacctcca

SEQ ID NO: 2004 - RNA, 75 nt, synthetic construct
  misc_feature 1..75: note = Description of sequence: tRNA-based effector molecule; TREM No.: 1242
  source 1..75: mol_type = other RNA
tgttccatggtgtaatggtaagcactccgatctctaaaatcggcgatccgagttcgagtctcggtggaacaacca

SEQ ID NO: 2005 - RNA, 75 nt, synthetic construct
  misc_feature 1..75: note = Description of sequence: tRNA-based effector molecule; TREM No.: 1243
  source 1..75: mol_type = other RNA
ggttccatggtgtaatggtaagcacttctctctctaaatgagaagatccgagttcgaatctcggtggaacctcca

SEQ ID NO: 2006 - RNA, 75 nt, synthetic construct
  misc_feature 1..75: note = Description of sequence: tRNA-based effector molecule; TREM No.: 1244
  source 1..75: mol_type = other RNA
gggacgatggtgtaatggtaagcactccggcctctaaatccggcgatccgagttcgagtctcggtcgtccctcca

SEQ ID NO: 2007 - RNA, 75 nt, synthetic construct
  misc_feature 1..75: note = Description of sequence: tRNA-based effector molecule; TREM No.: 1245
  source 1..75: mol_type = other RNA
tgttccatggtgtaatggtaagcactccgatctctaaaatcggcgatccgagttcgagtctcggtggaacagcca

SEQ ID NO: 2008 - RNA, 75 nt, synthetic construct
  misc_feature 1..75: note = Description of sequence: tRNA-based effector molecule; TREM No.: 1246
  source 1..75: mol_type = other RNA
gggtccatggtgtaatggtaagcactacaacctctaaagttgtagatccgagttcgagtctcggtggaccctcca

SEQ ID NO: 2009 - RNA, 75 nt, synthetic construct
  misc_feature 1..75: note = Description of sequence: tRNA-based effector molecule; TREM No.: 1247
  source 1..75: mol_type = other RNA
gggtccatggtgtaatggtaagcacgtctctctctaaaagagacgatccgagttcgagtctcggtggaccctcca

SEQ ID NO: 2010 - RNA, 75 nt, synthetic construct
  misc_feature 1..75: note = Description of sequence: tRNA-based effector molecule; TREM No.: 1248
  source 1..75: mol_type = other RNA
ggttccatggcgtaatggtaagcgctcacacctctaaagtgtgcgatccgagttcgagtctcggtggaaccccca

SEQ ID NO: 2011 - RNA, 75 nt, synthetic construct
  misc_feature 1..75: note = Description of sequence: tRNA-based effector molecule; TREM No.: 1249
  source 1..75: mol_type = other RNA
ggttcgatggtgtaatggtaagcactcagtactctaaacactgcgatccgagttcgagtctcggtcgaacctcca

SEQ ID NO: 2012 - RNA, 75 nt, synthetic construct
  misc_feature 1..75: note = Description of sequence: tRNA-based effector molecule; TREM No.: 1250
  source 1..75: mol_type = other RNA
ggctccatggtgtaatggtaagcactgctttctctaaataagcagatccgagttcgagtctcggtggagcctcca

SEQ ID NO: 2013 - RNA, 75 nt, synthetic construct
  misc_feature 1..75: note = Description of sequence: tRNA-based effector molecule; TREM No.: 1251
  source 1..75: mol_type = other RNA
ggatccgtggtgtaatggtaagcacacaggcctctaaatcctgcgatacgagttcgagtctcgtcggatcctcca

SEQ ID NO: 2014 - RNA, 75 nt, synthetic construct
  misc_feature 1..75: note = Description of sequence: tRNA-based effector molecule; TREM No.: 1252
  source 1..75: mol_type = other RNA
ggatccatggtgtaatggttagcactctggcctctaaatccagggatccgagttcgagtctcggtggatcctcca

SEQ ID NO: 2015 - RNA, 75 nt, synthetic construct
  misc_feature 1..75: note = Description of sequence: tRNA-based effector molecule; TREM No.: 1253
  source 1..75: mol_type = other RNA
ggttccgtggtgtaatggttagcacaccggcctctaaatccggcgatccgagttcgagtctcggcggaacctcca

SEQ ID NO: 2016 - RNA, 86 nt, synthetic construct
  misc_feature 1..86: note = Description of sequence: tRNA-based effector molecule; TREM No.: 1254
  source 1..86: mol_type = other RNA
accaggatggccgagtggttaaggcgttggactctagatccaatggacatatgtccgcgtgggttcgaaccccactcctggtacca

SEQ ID NO: 2017 - RNA, 87 nt, synthetic construct
  misc_feature 1..87: note = Description of sequence: tRNA-based effector molecule; TREM No.: 1255
  source 1..87: mol_type = other RNA
gaccaggatggccgagaggttaaggcgttggactctagatccaatggacaaatgtcctcgtgggttcgatccccactcctggtacca

SEQ ID NO: 2018 - RNA, 76 nt, synthetic construct
  misc_feature 1..76: note = Description of sequence: tRNA-based effector molecule; TREM No.: 1256
  source 1..76: mol_type = other RNA
gcctgggtagctcagtcggtagagcatcagactctaaatctgagggtccagggttcaagtccctgtccaggcgcca

SEQ ID NO: 2019 - RNA, 76 nt, synthetic construct
  misc_feature 1..76: note = Description of sequence: tRNA-based effector molecule; TREM No.: 1257
  source 1..76: mol_type = other RNA
gccgacctagctcagttggtagagcgcgtggctctaaaccacgtggtcgagggttcgagtccctcggtcggcgcca

SEQ ID NO: 2020 - RNA, 85 nt, synthetic construct
  misc_feature 1..85: note = Description of sequence: tRNA-based effector molecule; TREM No.: 1258
  source 1..85: mol_type = other RNA
gctgtgatggccgagtggttaaggcgttggactctaaatccaatggggtctccccgcgcaggttcgaatcctgctcacagcgcca

SEQ ID NO: 2021 - RNA, 85 nt, synthetic construct
  misc_feature 1..85: note = Description of sequence: tRNA-based effector molecule; TREM No.: 1259
  source 1..85: mol_type = other RNA
gctgtggtggccgagtggttaaggcgttggactctaaatccaatgggttctacccacgcaggttcaaatcctgcccgcagcgcca

SEQ ID NO: 2022 - RNA, 76 nt, synthetic construct
  misc_feature 1..76: note = Description of sequence: tRNA-based effector molecule; TREM No.: 1260
  source 1..76: mol_type = other RNA
ccttcgatagctcagttggtagagcggaggactctagatccttaggtcgctggttcgaatccggctcgaaggacca

SEQ ID NO: 2023 - RNA, 77 nt, synthetic construct
  misc_feature 1..77: note = Description of sequence: tRNA-based effector molecule; TREM No.: 1261
  source 1..77: mol_type = other RNA
gccggcaatagctcagttggtagagcgtccgactctagatcggatggtccctggttcgattccgggttgccggacca

SEQ ID NO: 2024 - RNA, 76 nt, synthetic construct
  misc_feature 1..76: note = Description of sequence: tRNA-based effector molecule
  source 1..76: mol_type = other RNA
  modified_base 1: mod_base = gm
gtcccacatggtctagcggttaggattcctgattttaaaccaggcggcccgggttcgactcccggtgtgggaacca

SEQ ID NO: 2025 - RNA, 76 nt, synthetic construct
  misc_feature 1..76: note = Description of sequence: tRNA-based effector molecule
  source 1..76: mol_type = other RNA
  modified_base 1: mod_base = gm
gtcccacatggtctagcggttaggattcctggctttaaaccaggcggcccgggttcgactcccggtgtgggaacca

SEQ ID NO: 2026 - RNA, 76 nt, synthetic construct
  misc_feature 1..76: note = Description of sequence: tRNA-based effector molecule
  source 1..76: mol_type = other RNA
gtcccacatggtctagcggttaggattcctgattctaaaccaggcggcccgggttcgactcccggtgtgggaacca

SEQ ID NO: 2027 - RNA, 76 nt, synthetic construct; identical to SEQ ID NO: 1376
  misc_feature 1..76: note = Description of sequence: tRNA-based effector molecule
  source 1..76: mol_type = other RNA

SEQ ID NO: 2028 - RNA, 76 nt, synthetic construct
  misc_feature 1..76: note = Description of sequence: tRNA-based effector molecule
  source 1..76: mol_type = other RNA
gtccttcatggtctagcggttaggattcctggttctaacccaggcggcccgggttcgactcccggtgtaggaacca

SEQ ID NO: 2029 - RNA, 76 nt, synthetic construct; identical to SEQ ID NO: 2026
  misc_feature 1..76: note = Description of sequence: tRNA-based effector molecule
  source 1..76: mol_type = other RNA
  modified_base 1: mod_base = gm

SEQ ID NO: 2030 - RNA, 76 nt, synthetic construct; identical to SEQ ID NO: 1376
  misc_feature 1..76: note = Description of sequence: tRNA-based effector molecule
  source 1..76: mol_type = other RNA
  modified_base 1: mod_base = gm

SEQ ID NO: 2031 - RNA, 76 nt, synthetic construct; identical to SEQ ID NO: 2028
  misc_feature 1..76: note = Description of sequence: tRNA-based effector molecule
  source 1..76: mol_type = other RNA
  modified_base 1: mod_base = gm

SEQ ID NO: 2032 - RNA, 75 nt, synthetic construct
  misc_feature 1..75: note = Description of sequence: tRNA-based effector molecule
  source 1..75: mol_type = other RNA
tcccacatggtctagcggttaggattcctggttttaacccaggcggcccgggttcgactcccggtgtgggaacca